(19) United States
(12) Patent Application Publication
(10) Pub. No.: US 2012/0156138 A1
(43) Pub. Date: Jun. 21, 2012

(54) Methods and Compositions for the Treatment of Medical Conditions Involving Cellular Reprogramming

(76) Inventor: Larry J. Smith, Omaha, NE (US)

(21) Appl. No.: 13/264,482

(22) PCT Filed: Apr. 14, 2009
(86) PCT No.: PCT/US2009/002365

§ 371 Date: Feb. 29, 2012

(51) Int. Cl. A61K 49/00; A61K 9/127; A61K 38/00; A61K 38/08; A61K 38/10; A61K 38/16; C12N 5/02; A61P 35/00; A61P 31/14; A61P 25/28; A61P 9/10; A61P 37/02; A61P 3/10; A61P 9/00; A61P 27/02; A61P 25/00; A61P 25/16; A61P 17/06; A61P 11/06; A61P 19/02; A61P 31/12; A61P 7/06; A61P 31/18; A61P 35/02; A61K 31/7088; B82Y 5/00

(52) U.S. Cl. 424/9.2; 514/44 A; 424/450; 514/1.2; 435/375; 977/773; 977/906

(57) ABSTRACT

The present invention provides a variety of nucleic acid based therapeutics and methods of use thereof which are effective to beneficially reprogram diseased cells such that they exhibit more desirable phenotypes. Also provided are compositions and methods to reprogram normal cells for medical and commercial purposes.

### FIELD OF THE INVENTION

[0001] The present invention relates to nucleic acid based therapeutic (NABT) compositions and methods of use thereof for treating a wide variety of medical disorders. More specifically, the invention provides NABT(s) which modulate expression of biologically relevant targets, thereby ameliorating disease symptoms and associated pathology. Also provided are methods for reprogramming target cells such that they exhibit more desirable phenotypes and/or enhanced desirable functions.

### BACKGROUND OF THE INVENTION

[0002] Numerous publications and patent documents, including both published applications and issued patents, are cited throughout the specification in order to describe the state of the art to which this invention pertains. Each of these citations is incorporated herein by reference as though set forth in full.

[0003] The conventional approach to drug target selection for medical conditions entails, in part, identifying those molecular targets that are directly (defined as having a direct cause-and-effect relationship with the medical condition) involved in producing the medical condition. Cancer, for example, appears to be caused by proto-oncogene activation to oncogene(s) combined with tumor suppressor gene inactivation. It follows from this conventional view, that anticancer drugs should be developed that inhibit oncogenes and/or which reinstate the activity of tumor suppressors.

[0004] In contrast, the present inventor has found that cancer, is one of a number of medical conditions where important drug targets do not have a direct cause-and-effect role to play in producing and/or in maintaining the pathologic features of the medical condition. A common aspect of these medical conditions is that they all depend on the expression of particular cellular programs for many, if not all, of their pathologic effects. These medical conditions have been termed Aberrant Programming (AP) Diseases by the present inventor and the molecular basis for such Aberrant Programming has been described in a molecular model (AP Model). This model provides important drug targets for the design of agents useful for treating such medical conditions and implicates transcriptional regulators (TRs) which control cellular programming as desirable targets. According to the AP Model, TRs are expressed by the AP cells in abnormal combinations. Thus, it is the combination of the TRs that is pathological, rather than any individual TR. In turn, this abnormal combination alters cellular programming resulting in the pathologic cellular behavior observed in these conditions. It follows from this that altering the pattern of TR expression in AP Cells is a key therapeutic goal. An unconventional aspect of this approach is that it provides that inhibiting the expression of the same TR in different cellular contexts, for example—an AP Cell verses its normal counterpart, will have different effects on cellular programming that in many instances can be exploited for therapeutic or other commercial purposes.

[0005] The AP Model also identifies AP Risk Factors for the AP disease. The presence of AP Risk Factors can lead to the occurrence of abnormal patters of TR expression. AP Risk Factors can be structurally normal or structurally abnormal molecules, including abnormal TRs or abnormally expressed TRs, and are often expressed by AP Cells. AP Risk Factors may only be important for the initiation of an abnormal pattern of TR expression or they may be needed on an ongoing basis.

[0006] The AP Model, described in U.S. Pat. No. 5,654,415 and WO 93/03770, also applies to certain medical conditions involving higher order functioning in the brain. TRs, particularly those involved in the control of cellular programming, also regulate higher-order functioning in the nervous system. NABTs directed to c-fos, for example, have been shown to alter neurological functioning in animal models (Dragunow et al., Neuroreport 5: 305, 1993). Altered patterns of TR expression in nerve cells can result in Aberrant Programming of the nerve cells, resulting in changes in patterns of neurotransmitter expression, and qualitative and quantitative changes in inter-neuronal contacts observed in certain medical conditions.

[0007] Conventional antisense oligos directed to transcripts of a given target gene vary widely in their ability to block the expression of that gene in cells. This appears to be due to 1) variations in the availability for binding of the particular target site on the transcript that is complementary to the antisense oligo; 2) the binding affinity of the oligo for the target and 3) the mechanism of antisense inhibition. Hence, what has been referred to as the poor uptake of oligos by some cell types in vitro may in large part reflect the use of antisense oligos that are not properly designed and are, therefore, not optimally potent. It is also possible that the culturing of cell lines under atmospheric oxygen conditions (which is the usual and common in vitro practice) produces a situation in which single stranded antisense oligos are made less active than they may be at much reduced (and more physiologically-relevant) oxygen tensions. The basis of this latter phenomenon could be due, at least in part, to the increased generation of reactive free oxygen radicals under ambient (atmospheric) oxygen levels by cells following treatment with any of several types of charged oligos, such as phosphorothioates. Highly reactive free oxygen radicals have been shown to have the capacity to alter the lipids in the surface membranes of cells, and to activate certain second-messenger pathways. Such alterations could lead to an inhibition of antisense oligo uptake and/or to other non-antisense oligo dependent biologic effects. A complete blockade of the induction of free radical formation by cells in response to exposure to oligos at atmospheric oxygen levels would require the presence of potent anti-oxidants such as, for example, vitamin C or vitamin E. Finally, in general, antisense oligos are more active in vitro when used on freshly obtained patient tissue specimens than they are when used on established cell lines grown (Eckstein, Expert Opin Biol Ther 7: 1021, 2007). In general, the successful treatment of cell lines in vitro with antisense oligos requires the use of a carrier. In vivo, antisense oligos are much more active compared to in vitro even if targeted to transplanted cell lines (Dean and McKay Proc. Natl. Acad. Sci. USA 91: 11762, 1994).

[0008] A significant number of the in vitro successes in the application of conventional antisense oligos for therapeutic purposes have been readily extrapolated to in vivo use. This is evidenced by the many publications showing the in vivo efficacy of antisense oligos against their intended target. Furthermore, numerous antisense oligos have been approved by regulatory agencies around the world for clinical testing. Most of these contain a phosphorothioate backbone. Pharmacologic/toxicologic studies of phosphorothioate antisense oligos have shown that they are adequately stable under in vivo conditions, and that they are readily taken up by all the tissues in the body following systemic administration (Iversen, Anticancer Drug Design 6:531, 1991; Iversen, Antisense Res. Develop. 4:43, 1994; Crooke, Ann. Rev. Pharm. Toxicol. 32: 329, 1992; Cornish et al., Pharmacol. Comm. 3: 239, 1993; Agrawal et al., Proc. Natl. Acad. Sci. USA 88: 7595, 1991; Cossum et al., J. Pharm. Exp. Therapeutics 269: 89, 1994). In addition, these compounds readily gain access to the tissue in the central nervous system in large amounts following injection into the cerebral spinal fluid (Osen-Sand et al., Nature 364: 445, 1993; Suzuki et al., Amer J. Physiol. 266: R1418, 1994; Draguno et al., Neuroreport 5: 305, 1993; Sommer et al., Neuroreport 5: 277, 1993; Heilig et al., Eur. J. Pharm. 236: 339, 1993; Chiasson et al., Eur J. Pharm. 227: 451, 1992). Phosphorothioates per se have been found to be relatively non-toxic, and the class specific adverse effects that are seen occur at higher doses and at faster infusion rates than is needed to obtain a therapeutic effect with a well chosen sequence.

[0009] Despite the numerous documented successful treatments of animal models with conventional antisense oligos, clinical successes with these molecules to date have been few. The obstacles to clinical success involve problems in the following areas: choice of animal models predictive of clinical activity, gene target choice, selection of best mechanism for inhibiting the selected gene target, selection of optimum hybridizing sequences for that purpose, proper choice of carrier to be used if any and use of interfering concomitant medications.

[0010] The present invention addresses all of these drawbacks and provides important improvements in all of these aspects, thereby providing efficacious agents for the successful treatment of a variety of different medical conditions.

### SUMMARY OF THE INVENTION

[0011] The present invention provides methods and compositions that substantially overcome a collection of impediments that together have prevented the robust use of NABTs for clinical purposes.

[0012] In one aspect, a composition, comprising in a biologically acceptable carrier, at least one nucleic acid based therapeutic (NABT) for down modulating target gene expression is provided, the NABT comprising a nucleic acid sequence which inhibits production of at least one gene product encoded by a target gene, said sequence optionally comprising one or more modifications selected from the group consisting of i) at least one modification to the phosphodiester backbone linkage; ii) at least one modification to a sugar in said nucleic acid; iii) a support; iv) at least one cellular penetrating peptide or a cellular penetrating peptide mimetic; v) an endosomal lytic moiety; vi) at least one specific binding pair member or targeting moiety; and viii) operable linkage to an expression vector, wherein said nucleic acid sequence is selected from the group of sequences in Table 8, with the proviso that when i, ii, iii, iv, v, vi, viii are absent, said nucleic acid is not SEQ ID NOS: 1, 2, 3, 4, or 2265-2293. NABTs described herein can be selected from the group consisting of an antisense NABT, a modified antisense NABT, an RNAi NABT, a modified RNAi NABT, each of the NABT optionally being encoded by an expression vector suitable for expressing said NABT in a target cell.

[0013] Table 11 provides a listing of such targets and the diseases or pathological conditions where down modulation of the targets should be effective to therapeutically reprogram cells. Table 4 provides a list of viral diseases that may be treated with the NABT described herein.

[0014] In another aspect the nucleic acid comprises at least one modified linkage or modified sugar as described further herein below. NABTs comprising piperazines, morpholinos, 2′ fluoro (e.g., fluorine in same stereo orientation as the hydroxyl in ribose), FANA and LNA modifications are particularly preferred. The NABTs encompassed by the present invention may act via a steric hindrance mechanism or they may degrade the target nucleic acid by triggering RNAse H activity. In certain embodiments, the NABT can be a gapmer which promotes RNAse H activity and exhibits increased binding affinity for the target nucleic acid.

[0015] The compositions of the invention can also comprise a support selected from the group consisting of nanoparticles, dendrimers, nanocapsules, nanolattices, microparticles, micelles, spieglemers, Hemagglutinating virus of Japan (HVJ) envelope and liposomes which facilitates uptake of the NABT into target cells.

[0016] The NABTs may optionally be linked to a cellular penetrating peptide moiety or a mimetic thereof. A variety of CPPs for this purpose are disclosed herein. Another moiety that increases the bioavailability of the NABT is an endosomal lytic component. Accordingly use of such components is also contemplated herein. To further increase specificity of targeting for the NABT, the compositions of the invention may also comprise at least one member of a specific binding pair or targeting moiety.

[0017] As mentioned above, expression vectors can be generated which comprise the NABT disclosed herein. The vector facilitates cellular uptake and expression of said NABT encoding sequences within the cell resulting in down modulation of the sequence targeted by the NABT.

[0018] In yet another embodiment, the inventive composition can be a double or single stranded siRNA molecule. Another embodiment encompasses a double stranded dicer substrate RNA comprising a passenger strand and a guide strand 25-30-nucleotides in length which is cleaved intracellularly to form substantially double stranded 21-mers with a two nucleotide (2-nt) overhang on each 3′ end. Such siRNA or dicer substrates may optionally be comprised in an expression vector.

[0019] Formulations, comprising the NABT compositions of the invention are also provided herein. Such formulations can be suitable for oral, intrabuccal, intrapulmonary, rectal, intrauterine, intratumor, intracranial, nasal, intramuscular, subcutaneous, intravascular, intrathecal, inhalable, transdermal, intradermal, intracavitary, implantable, iontophoretic, ocular, vaginal, intraarticular, otical, aerosolized, intravenous, intramuscular, systemic, parenteral, intraglandular, intraorgan, intralymphatic, implantable, slow release, and enteric coating formulations.

[0020] Also included in the present invention is a method for down modulating expression of a target gene for the treatment of an aberrant programming disease in a target cell. An exemplary method comprising administration of an effective amount of at least one composition comprising an NABT as set forth in Table 8, thereby reprogramming said target cell, said reprogramming altering the aberrant programming disease phenotype thereby providing a beneficial therapeutic or commercial effect. In certain embodiments, pairs of NABT are administered such as those pairs targeting SGP-2 or p53 as described in Tables 18-23. Such combinations can act synergistically to more effectively down modulate expression of the target sequences.

[0021] In a particularly preferred embodiment, reprogramming is therapeutically beneficial to diseased cells and normal cells are not adversely affected.

[0022] The methods for administering the NABTs of the invention can further comprise administration of an augmentation agent, selected from the group consisting of antioxidants, polyunsaturated fatty acids, chemotherapeutic agents, genome damaging agents and ionizing radiation. In particularly preferred embodiments, such agents act synergistically with the NABT described herein thereby exhibiting superior efficacy for the treatment of aberrant programming diseases. Diseases to be treated in accordance with the present invention are selected from the group consisting of Cancer, AIDS, Alzheimer's disease, Amyotrophic lateral sclerosis, Atherosclerosis, Autoimmune Diseases, Cerebellar degeneration, Cancer, Diabetes Mellitus, Glomerulonephritis, Heart Failure, Macular Degeneration, Multiple sclerosis, Myelodysplastic syndromes, Parkinson's disease, Prostatic hyperplasia, Psoriasis, Asthma, Retinal Degeneration, Retinitis pigmentosa, Rheumatoid arthritis, Rupture of atherosclerotic plaques, Systemic lupus erythematosis, Ulcerative colitis, viral infection, ischemia reperfusion injury, cardiohypertrophy, Diamond Black Fan anemia and other disorders listed in Table 11.

[0023] In yet another aspect, a method for optimizing the efficacy of NABT for treatment of aberrant programming diseases is provided. An exemplary method entails, selecting a target gene sequence which regulates cellular programming and a sequence which hybridizes therewith from Table 8, incubating the aberrantly programmed diseased cells in the presence and absence of said at least one NABT molecule, said NABT comprising one or more modifications selected from the group consisting of i) at least one modification to the phosphodiester backbone linkage; ii) at least one modification to a sugar in said nucleic acid; iii) a support; iv) at least one cellular penetrating peptide or a cellular penetrating peptide mimetic; v) an endosomal lytic moiety; vi) at least one specific binding pair member or targeting moiety; and viii) operable linkage to an expression vector. Those NABTs which exhibit improved effects on cellular reprogramming relative to cells treated NABT lacking at least one modification of these modifications is identified); thereby providing efficacious modified NABT for the treatment of aberrant programming disorders. In a further aspect, normal cells are contacted with the NABT identified, thereby identifying those NABTs which differentially affect cellular programming in aberrantly programmed cells versus normal cells. NABT to be assessed in the foregoing method can be selected from the group consisting of an antisense NABT, a modified antisense NABT, an RNAi NABT, a modified RNAi NABT, each of the NABT optionally being encoded by an expression vector suitable for expressing said NABT in a target cell.

### BRIEF DESCRIPTION OF THE DRAWINGS

[0024] FIG. 1: Graph showing Effect of NABTs targeting JunD, CREBP-1 or p53 on Acute Myelogenous Leukemic Blasts Freshly Obtained from Patients.

[0025] FIG. 2 provides schematic diagrams of many of the NABTs of the invention and the various components thereof. The most basic structure (1) is simply the sequence of the NABT per se which optionally possesses a modified backbone structure. Such molecules work via a conventional antisense mechanism, and may also depend on steric hindrance and/or RNAase H function. They can be systemically delivered and thus can target multiple affected tissue sites. In another embodiment (2), the NABT is operably linked to a cell penetrating peptide (CPP) to facilitate cellular uptake. In this construct, an endosomal lytic component may or may not be present. NABTs which function via an RNAi mechanism are shown in (3). In these constructs, the NABT is operably linked (either covalently or non-covalently) to a support molecule (e.g., a liposome or a nanoparticle), which in turn is linked to one or more CPP(s). In certain embodiments, endosomal lytic components are included in the construct to enhance intracellular delivery of the NABT. When the NABT is a conventional antisense molecule which is used for delivery to hypoxic tissues, construct (4) will be employed wherein the NABT is operably linked to a support which in turn is linked to one or more CPPs which comprise one or more endosomal lytic components. Should it be desirable to utilize NABT for delivery to hypoxic tissues which function via an RNAi mechanism, construct (5) will be employed. Such constructs comprise an RNA based NABT which is linked to a support structure which in turn is linked to one or more CPPs which comprise one or more endosomal lytic components. When specific targeting to a particular organ or tissue is desired, construct (6) can be utilized. This NABT functions via a conventional antisense mechanism and includes the NABT operably linked to a structural support which in turn is linked to at least one CPP and at least one endosomal lytic component. The construct may also comprise a receptor ligand targeting molecule to facilitate uptake of the NABT into the tissue or organ of interest. Construct (7) functions via an RNAi mechanism and is useful for facilitating delivery of the NABT to a particular organ or tissue target and comprises the NABT operably linked to a support, the support comprising one or more CPP and optionally one or more endosomal lytic components. The support may also comprise one or more receptor ligand molecules to facilitate uptake into the desired tissue. While the NABT constructs are shown in a linear fashion, the components thereof may be arranged differently provided the included components function as designed. For example, the CPP may be operably linked 5′ or 3′ to the NABT, so long as CPP and NABT activity are maintained.

[0026] FIG. 3: A schematic diagram showing a transport moiety operably linked to the terminus of an NABT of the invention.

### DETAILED DESCRIPTION OF THE INVENTION

[0027] The present invention provides nucleic acid based therapeutics (NABTs) useful for the treatment of a wide variety of medical conditions and methods of use thereof. The NABTs of the invention may act via a conventional antisense mechanism, or RNAi mechanism and can include conventional antisense oligonucleotides (oligos), RNAi and expression vectors. The NABTs described herein are effective to modulate the expression of selected genes of interest, thereby ameliorating the pathological symptoms associated with certain medical conditions.

[0028] Methods and compositions are also provided for treating medical conditions in which the direct cause is the expression in the disordered cells (AP Cells) of one or more pathogenic cellular programs that result from the expression of abnormal combinations of transcriptional regulators (TRs). These conditions form a spectrum with those showing the most radical programming abnormalities being hereinafter referred to as Aberrant Programming (AP) Diseases. At the other end of the spectrum are Programming Disorders that have more restricted programming abnormalities. The basic molecular pathology of these medical disorders can be explained by the AP Model provided herein that in part is based on combinatorial regulation model for the control of normal cellular programming. Related embodiments provide the means for combinatorial regulation of gene expression, for reprogramming normal cells for therapeutic or other commercial purposes. The invention also relates to methods and compositions for treating AP Diseases and Programming Disorders along with a variety of other medical conditions where the target selection is based on the conventional approach of using an established cause-and-effect relationship between said molecular drug target and pathologic events that characterize the medical condition.

[0029] The following definitions and terms are provided to facilitate an understanding of the invention.

[0030] “Nucleic acid based therapeutic(s)” (NABT) are a class of therapeutic agents useful for the treatment of the medical conditions presented herein. NABTs include but are not limited to oligonucleotide and oligonucleotide-like molecules (“oligos”) that may be single or double stranded and which may be based on protein nucleic acid (PNA), RNA, DNA or other nucleotide analog chemistry defined more fully herein or a hybrid of these chemistries. NABTs include, but are not limited to, conventional antisense oligos, RNAi and expression vectors capable of causing the expression of such transcripts in cells.

[0031] “Conventional antisense oligos” are single stranded NABTs that inhibit the expression of the targeted gene by one of the following mechanisms: (1) steric hindrance—e.g., the antisense oligo interferes with some step in the sequence of events leading to gene expression resulting in protein production by directly interfering with the step. For example, the antisense oligo may bind to a region of the RNA transcript of the gene that includes a start site for translation which is most often an AUG sequence (other possibilities are GUG, UUG, CUG, AUA, ACG and CUG) and as a result of such binding the initiation of translation is inhibited; (2) induction of enzymatic digestion of the RNA transcripts of the targeted gene where the involved enzyme is not Argonaute 2. Most often the enzyme involved is RNase H. “RNase H” recognizes DNA/RNA or certain DNA analog/RNA duplexes (not all oligos that are DNA analogs will support RNase H activity) and digests the RNA adjacent to the DNA or DNA analog hybridized to it; and (3) combined steric hindrance and the capability for inducing RNA digestion in the manner just described.

[0032] NABTs that are “RNAi” make use of cellular mechanism involved in processing of endogenous RNAi. In brief, this mechanism involves the loading of an antisense oligo often referred to as a “guide strand” into a molecular complex called the RNA-induced silencing complex (“RISC”). The guide strand then directs the resultant RISC entity to its binding site on the target gene RNA transcript. Once bound, the RISC directs cleavage of the RNA target by an argonaute enzyme or in the alternative, translation may be inhibited by a steric hindrance mechanism. In a variant manifestation, the RISC may be directed to the gene itself where it can play an inhibitor function. Such NABTs may be administered in one of three forms. These are the following: (a) dicer substrates, (b) double stranded siRNA (siRNA) and (c) single stranded siRNA (ss-siRNA). With the exception of ss-siRNA, RNAi is a double stranded structure with one or more so-called passenger strand(s) hybridized to the guide strand. In most instances NABTs that are dicer substrates or that are siRNA will require a carrier to deliver them to the cytosol of the cells expressing the gene to be inhibited.

[0033] NABTs that are “expression vectors” have three basic components: (1) a double stranded gene sequence capable of driving gene expression in cells; (2) a double stranded sequence with one strand capable of giving rise to an RNA transcript that will bind to transcripts of the target gene where the sequence is oriented with respect to the sequence capable of driving expression in a way that causes this strand to be expressed in cells; and (3) a carrier capable of getting the DNA sequence just described into the nuclei of the target cells where the DNA sequence can be expressed.

[0034] For convenience, the monomers comprising the oligo sequences of individual NABTs will be termed herein “nucleotides” or “nucleosides” but it is to be understood that for NABTs, other than expression vectors, the normal sugar moiety (deoxyribose or ribose) and/or the normal base (adenine, guanine, thymine, cytosine and uracil) moieties may be substantially modified or even replaced by functionally similar analogs, for example, the normal sugar may have a fluorine inserted in the 2′ position or be entirely replaced by a different ring structure as is the case with piperazine or morpholino oligos. Further, in particular embodiments, the nucleotides or nucleosides within an oligo sequence may be abasic. In addition, the linkers between the monomers will often be varied from the normal phosphodiester structure and can include one or more of several other possibilities depending on such considerations as the need for nuclease resistance, high target sequence binding affinity, pharmacokinetics and preferential uptake by particular cell types. The alternating linker/sugar or sugar substitute structure of oligos comprising NABTs are referred to as the “backbone” while the normal bases or their substitutes occur as appendages to the backbone.

[0035] “Cell penetrating peptides” (CPPs) are peptides that promote cell penetration. CPPs may be naturally occurring protein domains or they may be designed based on the naturally occurring versions. CPPs typically share a high density of basic charges and are approximately 10-30 amino acids in length. CPPs useful in the NABTs of the invention are described further hereinbelow. “Endosomolytic and lysosomotropic agents” are agents that can be used in combination with a NABT to promote the release of said NABT from endosomes, lysosomes or phagosomes. The former are agents that are attached to NABTs or incorporated into particular NABT delivery systems while the latter agents may be so attached or incorporated or be administered as separate agents from, but in conjunction with, any such NABT used with or without a delivery system. Lysosomotropic agents have other desirable properties and can exhibit antimicrobial activity. In addition, NABTs that inhibit wild type p53 expression can interfere with endosome, lysosome and phagosome production and function thereby reducing NABT sequestration in these structures. This reduction surprisingly improves bioavailability and, therefore, enhances the inhibitory activity of NABTs that are administered during the time p53 expression is suppressed.

[0036] An endosomal lytic moiety refers to an agent which possesses at least endosomal lytic activity. In certain embodiments, an endosomal lytic moiety also exhibits lysosomolytic, phagosomolytic or lysosmotropic activity. A “specific binding pair” comprises a specific binding member and a binding partner which have a particular specificity for each other and which in normal conditions bind to each other in preference to other molecules. Such members and binding partners are also referred to as targeting molecules herein. Examples of specific binding pairs include but are not limited to ligands and receptor, antigens and antibodies, and complementary nucleic acid molecules. The skilled person is aware of many other examples. Further the term “specific binding pair” is also applicable to where either or both of the specific binding pair member and the binding partner comprise a part of a larger molecule. A “cellular program” refers to the appearance in cells, of a cell-type restricted coordinated pattern of gene expression over time. The fundamental or overarching program is a “differentiation program” that produces the basic differentiated phenotype of the cell, for example, producing a liver cell or a blood cell of a particular type, and that such differentiated phenotypes in turn determine the responses, if any, of the cell in question to exogenous or endogenous cues, for example DNA damage resulting from exposure to chemotherapy or radiation. These responses include cellular programs that control cellular viability and proliferation. Thus the differentiation program is a master program that controls various secondary programs.

[0037] A “stem cell” is a rare cell type in the body that exhibits a capacity for self-renewal. Specifically when a stem cell divides the resulting daughter cells are either committed to undergoing a particular differentiation program (along with any progeny) or they are a replica of the parent cell. In other words, the replica cells are not committed to undergo a differentiation program. When the division of a stem cell produces daughter cells that are replicas of the parent cell, the division is called “self-renewal.” Accordingly, stem cells are able to function as the cellular source material for the maintenance and/or expansion of a particular tissue or cell type.

[0038] There are many types of stem cells and often any given type exists in a hierarchy with respect to the differentiation potential of any daughter cells committed to undergoing a differentiation program. For example, a more primitive hematopoietic stem cell could have the capacity to produce committed daughter cells that in turn have the capacity to give rise to progeny that include any myelopoietic cell type while a less primitive hematopoietic stem cell might be only capable of producing committed daughter cells that can give rise to monocytes and granulocytes.

[0039] “Embryonic stem (ES) cells” are stem cells derived from embryos or fetal tissue and are known to be capable of producing daughter cells that are duplicates of the parent ES or that differentiate into cells committed to the production of cells and tissues of one of the three primary germ layers.

[0040] “Induced pluripotent (iPS) stem cells” are created (induced) from somatic cells by human manipulation. Such manipulation has typically involved the use of expression vectors to cause the expression of certain genes in the somatic cells. “Pluripotent” refers to the fact that such stem cells can produce daughter cells committed to one of several possible differentiation programs.

[0041] “Chemotherapeutic agents” are compounds that exhibit anticancer activity and/or are detrimental to a cell by causing damage to critical cellular components, particularly the genome (e.g., by causing strand breaks or other modifications to DNA). In anti-cancer applications, it may be desirable to combine administration of the NABTs described herein with administration of chemotherapeutic agents, radiation or biologics. Suitable chemotherapeutic agents for this purpose include, but are not limited to: alkylating agents (e.g., nitrogen mustards such as chlorambucil, cyclophosphamide, isofamide, mechlorethamine, melphalan, and uracil mustard; aziridines such as thiotepa; methanesulphonate esters such as busulfan; nitroso ureas such as carmustine, lomustine, and streptozocin; platinum complexes such as cisplatin and carboplatin; bioreductive alkylators such as mitomycin, procarbazine, dacarbazine and altretamine); DNA strand-breakage agents (e.g., bleomycin); topoisomerase II inhibitors (e.g., amsacrine, dactinomycin, daunorubicin, idarubicin, mitoxantrone, doxorubicin, etoposide, and teniposide); DNA minor groove binding agents (e.g., plicamydin); antimetabolites (e.g., folate antagonists such as methotrexate and trimetrexate; pyrimidine antagonists such as fluorouracil, fluorodeoxyuridine, CB3717, azacitidine, cytarabine, and floxuridine; purine antagonists such as mercaptopurine, 6-thioguanine, fludarabine, pentostatin; asparginase; and ribonucleotide reductase inhibitors such as hydroxyurea); tubulin interactive agents (e.g., vincristine, vinblastine, and paclitaxel (Taxol)).

[0042] In a particular embodiment, the chemotherapeutic agent is selected from the group consisting of: pacitaxel (Taxol®), cisplatin, docetaxol, carboplatin, vincristine, vinblastine, methotrexate, cyclophosphamide, CPT-11, 5-fluorouracil (5-FU), gemcitabine, estramustine, carmustine, adriamycin (doxorubicin), etoposide, arsenic trioxide, irinotecan, and epothilone derivatives.

[0043] “Biologic Agents” work by mimicking regulatory molecules including but not limited to monoclonal antibodies or antibody fragments which may be conjugated to toxins and hormone related agents (e.g., estrogens; conjugated estrogens; ethinyl estradiol; diethylstilbesterol; chlortrianisen; idenestrol; progestins such as hydroxyprogesterone caproate, medroxyprogesterone, and megestrol; and androgens such as testosterone, testosterone propionate, fluoxymesterone, and methyltestosterone); adrenal corticosteroids (e.g., prednisone, dexamethasone, methylprednisolone, and prednisolone); leutinizing hormone releasing agents or gonadotropin-releasing hormone antagonists (e.g., leuprolide acetate and goserelin acetate); and antihormonal antigens (e.g., tamoxifen, antiandrogen agents such as flutamide; and antiadrenal agents such as mitotane and aminoglutethimide).

[0044] When treating prostate cancer, in addition to radiation and chemotherapeutic agents (e.g., those showing activity against prostate cancer including taxanes, anthracyclines, alkylating agents, topoismerase inhibitors and agents active on microtubules) Preferred biologic agents for use in combination with the NABTs described herein (e.g., at least one of those targeting 5 alpha-reductase, β amyloid precursor protein, cyclin A, cyclin D3, Oct-T1, p53, Pim-1, Ref-1, SAP-1, SGP2, SRF, TGF-beta), include, without limitation, the conventional androgen antagonists (such as flutamide and bicalutamide) Abarelix (an injectable gonadotropin-releasing hormone antagonist (GnRH antagonist; Plenaxis™), abiraterone acetate, an inhibitor of cytochrome p450 (17 alpha)/C17-C20 lyase; C₂₆—H₃₃—N—O₂) and Degarelix, N-acetyl-3-(naphtalen-2-yl)-D-alanyl-4-chloro-D-phenylalanyl-3-(pyridin-3-yl)-D-alanyl-L-seryl-4-((((4S)-2,6-dioxohexahydropyrimidin-4-yl)carbonyl)amino)-L-phenylalanyl-4-(carbamoylamino)-D-phenylalanyl-L-leucyl-N6-(1-methylethyl)-L-lysyl-L-prolyl-D-alaninamide, a gonadotrophin-releasing hormone (GnRH) blocker which causes significant reductions in testosterone and prostate-specific antigen (PSA) levels.

[0045] “Transcriptional regulators” (TRs) or factors are the key regulators of gene expression. TRs are well known in the art and are discussed in documents listed below: Eukaryotic Transcription Factors, D S Latchman (author), 5^{th} edition 2007, Academic Press; and Transcription Factors (Handbook of Experimental Pharmacology), M Gossen, J Kaufmann and S J Triezenberg (editors), 1^{st} edition, 2004, Springer; and Transcriptional Regulation in Eukaryotes: Concepts, Strategies, and Techniques, 2^{nd} Edition, 2009, MF Carey, C L Peterson, and S T Smale (authors), Cold Spring Harbor Press. A subset of TRs can act together to control cellular programming by operating as a combinatorial regulation system. See Table 1. In other words, cellular programs are controlled by particular combinations of TRs rather than by individual TRs. Further, more than one such combination of TRs can produce basically the same effect on cellular programming. Consequently, a particular TR capable of being involved in cellular programming may or may not be necessary for the occurrence of a particular program depending on what other TRs are being expressed as well as on certain other factors such as the availability of particular genes for being expressed. Thus, the functional consequences of the expression of any given TR are context dependent.

[0046] In addition to cellular programming, TRs control the expression of housekeeping genes and/or genes whose expression is associated with a particular cellular phenotype such as hemoglobin expression in red blood cells. Any given TR may be restricted to the regulation of one of these groups of genes to the exclusion of the others or it may be involved in the regulation of multiple types of genes as just described but not necessarily at the same time.

[0047] There are estimated to be between 20,000 to 50,000 genes in the human genome distributed over 3×10⁹ base pairs of DNA. In any given cell type approximately 10,000 genes are expressed. Greater than 90% of these are expressed by many cell types and the large majority of these are referred to as “housekeeping genes.” Typically, differentially expressed genes in any given cell type number in the hundreds. It is these genes that make the difference between liver cells and brain cells, for example. The large majority of these are directly involved in carrying out the functions that characterize the cell type. Liver cells, for example, express a wide range of enzymes that are involved in ridding the body of many types of chemicals. Thus, given the modest number of non-housekeeping genes to be regulated in any given cell type and the power of combinatorial regulation systems to control complex phenomenon with few regulatory elements, it follows the number of TRs and their direct modifiers that are needed to control cellular programming in any given cell type is small.

[0048] Thus, although Table 1 presents a fairly long list of TRs involved in cellular programming, it should be understood that only a few TRs will be expressed by any given cell type. Accordingly, sub-combinations of suitable NABTs selected based on the medical condition to be treated should exhibit efficacy for the treatment of that medical condition. Of the TRs involved in cellular programming, certain TRs are more broadly expressed by various tissue types than others. These include but are not limited to the following: p53, AP-1, c-myc, Ets-1, Ets-2, NF-kappaB, E2F-1, ID-1, Oct-1, Rb and YY-1. Examples of TRs involved in cellular programming known in the art to have very restricted expression patterns include but are not limited to androgen receptor, estrogen receptor, the numerous hox TRs, HB24, HB9, EVX-1, EVX-2, L-myc, N-myc, OTF-3 and SCL. It is thus possible to prioritize the TRs listed in Table 1 based on their use in particular cell types and their particular pattern of TR expression.

[0049] Further, TRs often occur in families so that single probes can be designed that will facilitate detection of multiple TR encoding nucleic acids in simultaneous screening assays. An example is a single homeobox probe for screening for the presence in any given cell type of any of the multiple homobox genes. Other TR families appearing in Table 1 that can be screened for as groups, include, but are not limited to the following families: ATF, C/EBP, myc, jun, fos, myb, Ets, E2F, Gata, ID, IRF, MAD, Oct and SP. More restricted probes can then be used to further discriminate particular TRs in cells shown to express at least one member of a particular TR family using a more general probe. Thus, targeted cell types can be efficiently and rapidly screened for their pattern of TR expression.

[0050] The specific TRs and direct modifiers involved in regulating cellular programming expressed by a given cell type have either been previously determined or can be readily determined by the use of a variety of well established techniques several of which are presented herein.

[0051] TRs bind to other TRs and in certain cases also bind to an enhancer or silencer. The result of such binding is that the associated TR group or groups collectively associated with all the enhancers and silencers associated with a given transcribed sequence of DNA controls the levels of transcription of the associated DNA. Such transcribed DNA may be a gene (encoding a protein) or it may encode regulatory RNA such as microRNA.

[0052] TRs may be either normal or mutated and/or be expressed at normal or abnormal levels. According to the AP Model, an essential aspect of these medical conditions is the expression in the AP Cells of qualitatively and/or quantitatively abnormal combinations of TRs, where the TRs are among those involved in the control of cellular programming (Table 1) e.g., differentiation, proliferation and apoptosis. TRs may undergo alternative splicing or post-translational modifications that fundamentally alter their function. The molecular mechanisms that produce such modifications in TRs are varied and molecules producing such modifications are referred to herein as “direct modifiers”. Direct modifiers are also suitable targets for the practice of the present invention. Table 2 provides a list of relevant TRs and Table 3 includes a listing of the direct modifiers of these TRs. Such direct modifiers include but are not limited to certain tyrosine kinases.

[0053] Targeting of TRs or their direct modifiers for purposes other than altering cellular programming can find therapeutic use in accordance with the present invention. This approach hinges on a conventional cause and effect role for the TR in the pathology of the medical condition and does not necessarily hinge on the AP Model.

[0054] “Combinatorial regulation” refers to a regulation system for complex phenomenon determined by the expression pattern of different components acting in concert rather than on the expression of any given component. Perhaps the most common examples of a combinatorial system are alphabet-based languages where the letters in the alphabet are the regulatory components. Some of the embodiments of the present invention are based on combinatorial regulation models for the control of cellular programming, as provided herein, where the key components of the regulation system are TRs.

[0055] Several investigators have proposed that combinatorial regulation plays a general role in eukaryotic gene expression. See Scherrer, and Marcand, J Cell Phys 72: 181, 1968; Sherrer, Adv Exp Med Biol 44: 169, 1924; Gierer, Cold Spring Harbor Symp Quant Biol 38: 951, 1973; Stubblefield, J Theor Biol 118: 129, 1986; Bodnar, J Theor Biol 132: 479, 1988; and Lin and Riggs, Cell 4: 107, 1975. Using biophysical arguments, these authors demonstrated the impossibility of having a separate regulator for every gene in a eukaryotic cell. Combinatorial regulation models of eukaryotic gene expression generally postulate multiple levels of regulation in addition to transcription. In principle, these models show theoretically how 100,000 genes could be selectively controlled by as few as 50 regulatory molecules, only a small subset of which would operate at the level of what is defined here as a TR(s). Bodnar, J Theor Biol 132: 479, 1988.

[0056] As in language where the alphabet can generate words with the same effect (synonyms) the TR components of the key controlling mechanism for cellular programming can be grouped in a multiplicity of ways that produce basically the same impact on cellular programming. Accordingly, different TR patterns of expression can be expected between AP Diseases and Programming Disorders compared to their normal counterparts and between different types of normal cells. This situation provides the basis for a specificity of biologic effect and, therefore, therapeutic effect for NABTs and other drugs that affect TR expression and/or function.

[0057] It should be clear that the range of reasonable therapeutic drug targets for the treatment of a particular medical disorder where the targets function as part of a combinatorial regulation system is different than the range of reasonable targets based on the conventional approach to rational drug development. The latter is based on the establishment of simple consistent “cause-and-effect relationships” across a variety of cell types between the functions of a particular target molecule and a pathologic feature(s) of a particular medical disorder. The expression of the target molecule in question does not in all instances mean the effect will be seen but it does mean that if said target molecule produces a given effect of this nature, that the effect will be consistent. For example, bcl-2 functions to inhibit programmed cell death across a variety of cell types. This has been established on a simple cause-and-effect basis. Depending on what other bcl family members are expressed, however, bcl-2 expression in a given cell may or may not successfully inhibit programmed cell death in a particular situation, such as the occurrence of DNA damage to the cell in question, but importantly bcl-2 never functions to promote programmed cell death. Thus, in this context, bcl-2 is an example of a cell program regulator that does not function as part of a combinatorial regulation system.

[0058] A major embodiment of the present invention relates to methods and compositions for treating “Aberrant Programming (AP) Diseases” and “Programming Disorders.” These medical conditions include but are not limited to those listed in Table 2. These medical conditions share a common molecular pathology described by the “AP Model” in which the “direct cause” is the expression in the disordered cells that characterize said condition (“AP Cells”), of one or more cellular programs that are abnormally expressed and/or functionally abnormal. These abnormalities require the expression of abnormal (qualitative and/or quantitative abnormalities) combinations of TRs that operate as part of a combinatorial regulation system to control cellular programming. A salient feature of combinatorial regulation systems is that they require very few components in order to control very much larger and more complex systems. In other words, AP Diseases and Programming Disorders are directly caused by the expression of qualitative and/or quantitative combinations of TRs that do not occur in normal cells.

[0059] The cellular programs involved in these medical conditions include cellular differentiation, proliferation and viability (programmed cell death, senescence, autophagy, mitotic catastrophe, programmed necrotic cell death as well as other cellular programs for disabling cells—(For simplicity these programs will all be referred to as “apoptosis” in the following text although this term is usually restricted to programmed cell death. This is appropriate in this context because all of these cell disabling mechanisms are controlled by the same basic molecular mechanism involving TRs and described by the AP Model and thus, are cellular behaviors which can be targeted with the therapeutic approach, and NABTs set forth herein.)

[0060] The term “direct cause” with respect to pathogenesis of an AP Diseases or Programming Disorders which are characterized by abnormal patterns of TR expression is to be conceptually distinguished from the presence of “AP Risk Factors” although in some instances there will be an overlap where a particular AP Risk Factor has a direct causal role by both being responsible for producing an abnormal pattern of TR expression (the direct cause) and by also being a member of that abnormal pattern. In such an instance, the AP Risk Factor is structurally normal. Patterns of TR expression and, therefore, aberrant cellular programs can evolve over time and the expression of an abnormal pattern of TRs can become independent of any AP Risk Factors that were involved in producing the original defect.

[0061] Typically an AP Disease or Programming Disorder, and many other medical conditions, will be associated with “causal factors” that in various combinations may appear to “cause” or at least promote the likelihood of the medical condition. Often such risk factors are found on the basis of a statistically significant correlation. These risk factors can be, but are not limited to, the occurrence of abnormally expressed molecules where the abnormality is qualitative, as in a mutation, and/or quantitative. Such causal factors are to be distinguished from AP Risk Factors as defined herein.

[0062] In addition to identified specific molecular changes “AP Risk Factors” as well as “causal factors” more generally may, but not necessarily include, mutagenic events, viral infections, chromosomal abnormalities, genetic inheritance, improper diet and psychological state. The field of epidemiology provides the means for identifying both AP Risk Factors and causal factors. (Modern Epidemiology, K J Rotman, S Greenland and T L Lash, (2008) 3^{rd} edition, Lippincott Williams & Wilkins, New York, N.Y.)

[0063] AP Diseases and Programming Disorders can be manifested as a metaplastic, hyperplastic or hypoplastic condition or a combination of these. Certain molecular AP Risk Factors, such as mutated and/or over-expressed proteins, can be useful targets for the treatment of AP Diseases or Programming Disorder. These are a subset of “Molecular Risk Factors” a term that is more generally applied herein. As just stated, “Molecular Risk Factors” can be identified without the insights provided by the AP Model where normal genes encoding TRs or their direct modifiers become legitimate targets for therapeutic intervention as a result of their functioning as part of a combinatorial regulation system. Accordingly, “Molecular Risk Factors” also may be useful targets for treating a variety of medical conditions that include more that just AP Diseases and Programming Disorders, but in these instances they are identified by epidemiologic-like methods and do not require the AP Model for their identification.

[0064] It follows from these observations that cells with a particular differentiated phenotype can be “differentially reprogrammed” compared to other cells with a different differentiated phenotype by altering the expression of a single TR that may be expressed by both cell types. So differential reprogramming can involve inhibiting the expression of the same target in two different cell types and getting a different effect on cellular programming when the two cell types are compared. This applies to both normal cells and to AP cells.

[0065] The capacity of a particular NABT or combination of NABTs to cause differential reprogramming is generally but not necessarily determined by the “Reprogramming Test” disclosed herein. The Reprogramming Test can initially be carried out in vitro but it may also be carried on in vivo. In the case of AP Diseases and Programming Disorders, it is applicable both to potential targets selected on the basis of the AP Model and to targets that are selected based on the establishment of cause-and-effect relationships and where said targets are known modulators of apoptosis. Such targets, with bcl-2 being an example, may be modulators of cellular programming but the nature of their effect on cellular programming is not determined by their being part of a combinatorial regulation system. Targets of this nature are suitable for the practice of the present invention as provided for herein.

[0066] “dsRNA” refers to a ribonucleic acid based NABT molecule having a duplex structure comprising two anti-parallel nucleic acid strands with sufficient complementarity between adjacent bases on opposite strands to have a Tm of greater than 37° C. under physiologic salt conditions. dsRNA that are delivered as drugs typically will have modifications to the normal RNA structure and/or be protected by a carrier to provide stability in biologic fluids and other desirable pharmacologic features as described in more detail herein. The RNA strands may have the same or a different number of nucleotides.

[0067] “Introducing into” means uptake or absorption in the cell, as is understood by those skilled in the art. Absorption or uptake of NABTs can occur through cellular processes, or via the use of auxiliary agents or devices.

[0068] As used herein and as known in the art, the term “identity” is the relationship between two or more oligo sequences, and is determined by comparing the sequences. Identity also means the degree of sequence relatedness between oligo sequences, as determined by the match between strings of such sequences. Identity can be readily calculated (see, e.g., Computation Molecular Biology, Lesk, A. M., eds., Oxford University Press, New York (1998), and Biocomputing: Informatics and Genome Projects, Smith, D. W., ed., Academic Press, New York (1993), both of which are incorporated by reference herein). While a number of methods to measure identity between two polynucleotide sequences are available, the term is well known to skilled artisans (see, e.g., Sequence Analysis in Molecular Biology, von Heinje, G., Academic Press (1987); and Sequence Analysis Primer, Gribskovm, M. and Devereux, J., eds., M. Stockton Press, New York (1991)). Methods commonly employed to determine identity between oligo sequences include, for example, those disclosed in Carillo, H., and Lipman, D., SIAM J. Applied Math. (1988) 48:1073. “Substantially identical,” as used herein, means there is a very high degree of homology preferably >90% sequence identity.

[0069] As used herein, the term “treatment” refers to the application or administration of a NABT or other therapeutic agent to a patient, or application or administration of a NABT or other drug to an isolated tissue or cell line from a patient, who has a medical condition, e.g., a disease or disorder, a symptom of disease, or a predisposition toward a disease, with the purpose to cure, heal, alleviate, relieve, alter, remedy, ameliorate, improve, or affect the disease, the symptoms of disease, or the predisposition toward disease. In an alternative embodiment, tissues or cells or cell lines from a normal donor may also be “treated”.

[0070] As used herein, a “pharmaceutical composition” comprises a pharmacologically effective amount of a NABT, optionally other drug(s), and a pharmaceutically acceptable carrier. As used herein, “pharmacologically effective amount,” “therapeutically effective amount” or simply “effective amount” refers to that amount of an agent effective to produce a commercially viable pharmacological, therapeutic, preventive or other commercial result. For example, if a given clinical treatment is considered effective when there is at least a 25% reduction in a measurable parameter associated with a disease or disorder, a therapeutically effective amount of a drug for the treatment of that disease or disorder is the amount necessary to effect at least a 25% reduction in that parameter.

[0071] The term “pharmaceutically acceptable carrier” refers to a carrier or diluent for administration of a therapeutic agent. Pharmaceutically acceptable carriers for therapeutic use are well known in the pharmaceutical art, and are described, for example, in Remington's Pharmaceutical Sciences, A R Gennaro (editor), 18^{th} edition, 1990, Mack Publishing, which is hereby incorporated by reference herein. Such carriers include, but are not limited to, saline, buffered saline, dextrose, water, glycerol, ethanol, and combinations thereof. The term specifically excludes cell culture medium. For drugs administered orally, pharmaceutically acceptable carriers include, but are not limited to pharmaceutically acceptable excipients such as inert diluents, disintegrating agents, binding agents, lubricating agents, sweetening agents, flavoring agents, coloring agents and preservatives. Suitable inert diluents include sodium and calcium carbonate, sodium and calcium phosphate, and lactose, while corn starch and alginic acid are suitable disintegrating agents. Binding agents may include starch and gelatin, while the lubricating agent, if present, will generally be magnesium stearate, stearic acid or talc. If desired, the tablets may be coated with a material such as glyceryl monostearate or glyceryl distearate, to delay absorption in the gastrointestinal tract.

[0072] Two strategies for rationally identifying groups of drug targets were employed for the present invention. One of these is based on the AP Model and includes drug targets that comprise TRs involved in the control of cellular programming and their direct modifiers, Table 3. The other strategy is based on the establishment of direct cause-and-effect relationships and it applies to other medical disorders as well as to AP Diseases and Programming Disorders as well as to normal cell reprogramming. An important subgroup of such cause-and-effect relationships involve medical conditions where some or all of the pathologic features of the disorder result from the expression or lack of expression of an apoptosis program. Table 4 provides a list of such conditions with the AP Diseases and Programming Disorders listed at the top (4A) and other medical disorders listed at the bottom (4B). Table 5 provides a list of reasonable targets for these disorders that are not TRs and that are established on the cause-and-effect basis. This list included p53 because it can directly function in the regulation of apoptosis programs independently of its TR function. The initial selection of particular gene targets and the associated NABTs for such medical conditions are shown in Tables 2 and 4. In the case of the medical conditions shown in Table 4 the effect a successful NABT will exhibit on the AP Cells is provided in Table 6A or on damaged normal cells in Table 6B.

[0073] Individuals skilled in the art are well aware that several of the medical conditions listed in Table 2 as AP Diseases or Programming Disorders present clinically with more than one mechanistic basis, for example, type 1 and type 2 diabetes mellitus. In type 1, the underlying pathology is associated with the loss of the cells that produce insulin. In type 2, the underlying pathology results from the resistance of target cells for insulin to insulin. It follows that the application of the AP Model to AP Diseases and Programming Disorders with differences in the underlying pathology will likely respond to treatments targeting different therapeutic agents. Some conditions, such as obesity, will include subsets of patients with an underlying pathology that is obviously not related to alterations in cellular programming. In the case of obesity, the NABTs are designed to target molecules which function in cellular programming in the patient's adipocytes or are targeted to TRs exhibiting abnormal TR expression in these cells. Certain forms of obesity result from aberrant cellular programming in a patients adipocytes. Thus, NABT which target and reprogram the cells to reduce the increased deposit of fat are particularly preferred for this purpose. The specific cellular programs, TRs and their direct modifiers to be targeted are provided herein.

[0074] In some instances, the NABTs of the present invention will achieve the intended therapeutic goal more effectively when used in combination with an “augmentation agent.” Augmentation agents include anticancer treatments, agents causing oxidative stress or oxidative damage to cells (including but not limited to free-radical generators), antioxidants and agents that modulate TR expression and/or function. Guidance is provided herein on which augmentation agents are apt to be useful for particular purposes. Also discussed are situations where the agents do not function as augmentation agents, but on the contrary are contraindicated for use with particular NABTs and/or in the treatment of certain medical conditions. In addition to medications that are apt to be given to the patients of interest for NABT treatment, it is also important to consider what nutraceuticals patients are apt to be taking independent of and during administration of prescribed NABT containing regimens. The potential usefulness of an augmentation agent for use in combination with an NABT intended to alter cellular programming can be determined by means of the Reprogramming Test as applied in vitro and/or in vivo. A well established example in the art of the use of NABTs with augmentation agents is the use of conventional antisense oligos directed to targets that resist apoptosis in combination with anticancer treatments to treat cancer.

[0075] A free-radical generator could be used as an “augmentation agent” in combination with an antisense NABT designed in accordance with the present invention particularly in diseases where the objective is to kill the AP cell (for example, atherosclerosis, or cancer). Free radical generators include, but are not limited to, certain polyunsaturated fatty acids (including gamma linolenic acid, eicosapentaenoate and arachidonate), chemotherapeutic agents and ionizing irradiation as well as certain novel anticancer agents in development such as, but not limited to, inhibitors of oxygen radical scavengers as well as the reactive oxygen species (ROS) generators TDZD-8 (4-benzyl-2-methyl-1,2,4-thiadiazolidine-3,5-dione, a glycogen synthase kinase 3 inhibitor) and elesclomol.

[0076] Antioxidants have multiple potential effects that can impact the efficacy of a variety of therapeutic agents including but not limited to NABTs. These effects depend on the dose, NABT and medical condition being treated. Such effects include the induction of cell cycle arrest, induction of or inhibition of apoptosis, altering TR expression and/or function (e.g., NF-kappaB) as well as to scavaging free radicals, thereby limiting the biologic effects of the NABT.

[0077] Antioxidants include, but are not limited to, certain vitamins, minerals, trace elements and flavinoids. A complete listing of antioxidants would include those known to those skilled in the art, and may be found in standard advanced textbooks, such as, Zubay G L: “Biochemistry” (3rd edition), in 3 Volumes, Wm C Brown Communications, Inc., 1993; and in: Rice-Evans C A and Burdon R H (eds): “Free Radical Damage and Its Control”, New York: Elsevier, 1994; and in: Yagi K et al (eds): “5th International Congress on Oxygen Radicals and Antioxidants”, New York: Excerpta Medica Press, 1992 (International Congress Series, No. 998). Anti-oxidants that have been used clinically include, but are not limited to: ascorbic acid (vitamin C), allopurinol, alpha- and gamma-tocopherol (vitamin E), beta-carotene, N-acetyl cysteine, Desferol, Emoxipin, glutathione, histidine, lazaroids, Lycopene, mannitol, and 4-amino-5-imidazole-carboxamide-phosphate.

[0078] Information relating to the impact of particular oxidants and/or antioxidants on cells generally or in particular medical conditions is available in the art and can be found in the following documents: Alzheimer Disease: Neuropsychology and Pharmacology, G Emilien, C Durlach, K L Minaker, B Winblad, S Gauthier and Jean-Marie Maloteaux (Authors) Birkhäuser Basel; 1st edition, 2004; Oxidative Stress and the Molecular Biology of Antioxidant Defenses, JG Scandalios (Editor) Cold Spring Harbor Laboratory Press; 1st edition, 1996; Free Radicals and Inflammation, PG Winyard, DR Blake and CH Evans (Editors) Birkhäuser Basel; 1st edition, 2000; Oxygen/Nitrogen Radicals: Cell Injury and Disease, V Vallyathan, V Castranova and X Shi (Authors) Springer; 1 edition, 2002; Free Radicals, Oxidative Stress, and Antioxidants: Pathological and Physiological Significance, T Özben (Editor) Springer; 1st edition, 1998; Nutrients and Cell Signaling (Oxidative Stress and Disease), J Zempleni and K Dakshinamurti (Editors) CRC; 1st edition, 2005; Phytochemicals in Health and Disease (Oxidative Stress and Disease), Y Bao and R Fenwick (Editors) CRC; 1st edition, 2004; Natural Compounds in Cancer Therapy: Promising Nontoxic Antitumor Agents From Plants & Other Natural Sources, J Boik (Author) Oregon Medical Press; 1st edition, 2001; Handbook of Antioxidants (Oxidative Stress and Disease), L Packer and E Cadenas (Authors) CRC; 2nd edition, 2001; Anticancer Therapeutics, S Missailidis (Author) Wiley; 1st edition, 2009; Handbook of Nutrition and Food, CD Berdanier (Editor) 1st edition, 2001; Signal Transduction by Reactive Oxygen and Nitrogen Species: Pathways and Chemical Principles, HJ Forman, JM Fukuto and M Torres (Editors) Springer; 1st edition, 2003; Oxidative Stress and Neurodegenerative Disorders, G A Qureshi (Author), GAl Qureshi; SH Parvez (Editors) Elsevier Science; 1st edition, 2007; Oxidative Stress and Inflammatory Mechanisms in Obesity, Diabetes, and the Metabolic Syndrome, L Packer and H Sies (Editors) CRC; 1st edition, 2007; Macular Degeneration, PL Penfold and JM Provis (Editors) Springer; 1st edition, 2004; Oxidants in Biology: A Question of Balance, G Valacchi and PA Davis (Editors) Springer; 1st edition, 2008; Nutrient-Gene Interactions in Cancer, S Choi and S Friso (Editors) CRC; 1st edition, 2006; Nutrient-Gene Interactions in Health and Disease, N Moustaid-Moussa and CD Berdanier (Editors) CRC; 2nd edition, 2001; Endothelial Dysfunctions and Vascular Disease, R De Caterina and P Libby (Editors) Wiley-Blackwell; 1st edition, 2007; Nutrition and Wound Healing, JA Molnar (Editor) CRC; 1st edition, 2006; Antioxidants and Cardiovascular Disease, R Nath (Author), M Khullar (Author), PK Singal (Editor) Alpha Science International, Ltd, 2004; Cerebral Vasospasm, B Weir and RL Macdonald (Authors) Academic Press; 1st edition, 2001; Free Radical and Antioxidant Protocols, D Armstrong (Editor) Humana Press; 1st edition, 1998; Oxygen Radicals and the Disease Process, C Thomas (Author) CRC; 1st edition, 1998; Redox Biochemistry, R Banerjee, D Becker, M Dickman, V Gladyshev and S Ragsdale (Editors) Wiley; 1st edition, 2007; Free-Radical-Induced DNA Damage and Its Repair: A Chemical Perspective, C von Sonntag (Author) Springer; 1st edition, 2006.

[0079] The principal effects of free-radical generators or anti-oxidants on cells from the perspective of the AP Model is to produce an alteration in the pattern of TR being expressed, or, in the case of antioxidants, to prevent the adverse effects on cells produced by cellularly-generated free radicals subsequent to NABT binding. It follows from the AP Model that this pattern will be different following treatment with these “augmentation agents” when normal cells are compared with AP Cells. Hence, it is possible to combine this treatment with a pre-determined antisense NABT selected according to the criteria given herein (for example, in the Reprogramming Test) and expect different results for normal versus AP Cells.

[0080] The TRs that are known to be involved in cellular responses to free-radicals and apoptosis include, but are not limited to: the AP-1 group, including junD; the Egr group; Gadd group; Hox group; IRF group; the MAD, Max and Mxi groups; myc and myb groups; NF-kappaB; p53; Ref-1; Sp-1; TR-3 and TR-4; and USF. Other genes include those directly involved in the regulation of apoptosis that are not TRs. See Table 5.

[0081] “Hotspots” have been identified for more than 200 gene targets which are indexed in Table 7 and listed by sequence (provided in Table 8). Hotspots are continuous antisense sequences of varying lengths that form a template for oligos that are surprisingly well suited for use in NABTs where the NABT has at least one such strand that recognizes a gene or RNA transcript by complementary base or base analog pairing. Such NABTs tend to exhibit higher activity and fewer side effects than those chosen by the methods previously described in the art.

[0082] In the case of NABTs that are RNAi, this reduction in side effects includes a reduction in the inhibition of microRNA processing by cells and the concomitant reduction in the adverse effects of interfering with normal microRNA function. For each hotspot, one or more typically shorter sequences were selected to serve as prototype NABTs where the NABT is a conventional antisense oligo although they can be adapted for RNAi use. Size variant oligos suitable for use in conventional antisense and RNAi are also provided in Table 8. In the case of NABTs that are RNAi (dicer substrates or siRNA either single stranded or double stranded) certain modifications to the prototype sequence or size variants may be preferable in accordance with the guidance provided herein for the selection of optimal RNAi NABTs. NABTs based on the sequences provided in Table 8 can be used to study the functions of the genes they target as well as for other commercial uses and medical indications as described herein.

[0083] For the purposes of initial in vitro NABT screening and/or for commercial in vitro NABT use, carriers will typically be needed, particularly for RNAi. For conventional antisense oligos, cationic liposomal carriers have long been used for in vitro purposes and alternatively operably linked cell penetrating peptides (CPPs) may be employed. More complex carriers are more commonly used with RNAi for both in vitro and for in vivo use. For most in vivo use involving NABTs that are conventional antisense oligos or single stranded siRNA, a carrier will not be necessary. Preferred carriers suitable for use in the present invention are provided in more detail elsewhere herein.

[0084] In certain instances, NABTs which are effective to modulate target gene expression will be further assessed under a variety of different experimental conditions. Testing initially will be carried out in vitro but may be initially carried out in vivo particularly in situations where there is no suitable culture system for the AP Cells or in the case of the development of NABTs for medical conditions involving higher order brain functioning such as psychosis, depression or epilepsy. In other instances, the Reprogramming Test described herein can be applied to a significant degree in vivo. Methods for monitoring cell proliferation in vivo are well established and include methods based on immunohistochemistry and/or on metabolic labeling procedures. Further, in the last 10 years numerous techniques have been developed for the non-invasive monitoring of apoptosis in vivo. These techniques include but are not limited to those based on PET, SPECT, MRI, MRS, ultrasound and real-time imaging. These techniques are discussed in numerous documents including but not limited to the following: Kenis et al., Cell Mol Life Sci 64: 2859, 2007; Lahorte et al., Eur J Nucl Med Mol Imaging 31: 887, 2004; Corsten et al., Curr Opin Biotechnol 18: 83, 2007; Schoenberger et al., Curr Med Chem 15: 187, 2008; Flotats et al., Eur J Nucl Med Mol Imaging 30: 615, 2003; Blankenberg, Curr Pharm Des 10: 1457, 2004; and Belhocine and Blankenberg, Curr Clin Pharmacol 1: 129, 2006.

[0085] An NABT designed to inhibit the expression of a particular gene in human cells may not have an identical oligo sequence(s) to an NABT designed to inhibit the same gene in animal cells. Thus, in certain cases, the species specific homolog of an NABT may be synthesized in order to further characterization of the capacity of the NABT to reprogram cells in a therapeutically beneficial manner. Oligos for use in NABTs directed to animal versions of the gene targets listed in Table 7 can be obtained using the method described herein that was used to generate the oligo sequences for the human NABTs. In many instances, the animal oligo sequence will be derived from the human sequence by correcting any mismatches and then testing to see if the design criteria are still met. If not, an alternative animal oligo sequence can readily be generated using the design principles provided herein. Should animal cells need to be cultured to test NABTs directed to genes expressed by non-human cells, many references describing such culture systems are available to those with ordinary skill in the art and include but are not limited to the following: Animal Cell Culture Methods, L Wilson (Author) Academic Press; 1 edition, 1998 and Animal Cell Biotechnology: Methods and Protocols, R Pörtner (Editor) Humana Press; 2nd edition, 2007. The backbone chemistries and other design issues for such animal NABTs will follow the same principles provided herein for NABTs directed to human gene targets. Obviously, xenotransplantion of the appropriate human cells into an animal model can help mitigate the need for separate testing of an animal and a human version of a NABT directed to a particular gene target.

[0086] In cases where it is desirable to further assess or optimize NABT function, (e.g., cases where it is desirable to assess the effects of alteration of the carrier, backbone structure, and/or attached CPP for example) any in vivo testing initially will involve animal models, but in some instances initial efficacy testing will occur in patients following selection of an NABT capable of effectively inhibiting the desired gene target after appropriate pharmacokinetic and toxicologic testing is performed. The latter would occur in instances where suitable in vitro or animal models are not available. This could occur for reasons that include the following: (1) the AP cells from patents cannot be grown in vitro for a sufficient length of time to carry out NABT testing; (2) there is no available cell line with a phenotype that closely resembles the AP Cells in patients; (3) the available animal models do not show the key pathogenic features of the disorder in question in patients; (4) the AP Cells that may be used in otherwise apparently suitable in vitro or animal models do not have a TR expression pattern (Table 1) that is very similar to what is seen in the AP Cells from patients; or (5) the AP Cells otherwise appropriate for the in vitro or animal models fail to express a non-TR apoptosis regulator (Table 5) of interest. In vitro and in vivo models applicable to the development of the commercial uses for the NABTs provided herein are provided in Tables 9 and 10.

[0087] In another embodiment, NABTs containing nucleic acid sequences selected from Table 8 where said sequences are complementary to portions of RNA transcripts of target genes selected from Tables 3 or 5 and where the genes are expressed by the target cells are used to reprogram normal cells. Such normal cell reprogramming includes but is not limited to performing the following either in vitro or in vivo: (1) generating iPS cells from various somatic starting cell types such as, but not limited to, brain-derived neural stem cells, neural crest stem cells, keratinocytes, hair follicle stem cells, fibroblasts, hepatocytes and hematopoietic cells (Lowry and Plath Nature Biotech 26: 1246, 2008; Aasen et al., Nature Biotech 26: 1276, 2008; Silva et al. PLOS Biology 6: e253, 2008; Mali et al., Stem Cells 26: 1998, 2008; Lowry et al., Proc Natl Acad Sci USA 105: 2883, 2008; Dimos et al., Science 321: 1218, 2008). In a preferred embodiment, iPS cells to be used for tissue repair and engineering are prepared from somatic cells taken from the patient for whom said tissue repair is to be undertaken; (2) maintaining and expanding ES cells including ES cell lines; and (3) directing the differentiation of iPS or ES cells including ES cell lines into desired cell types such as but not limited to nerve, cardiac, skin or islet cells for tissue repair and engineering. Such ES and iPS cells can be used for a variety of medical purposes including but not limited to tissue repair and engineering, fighting infection or treating autoimmune diseases. It is often desirable to expand iPS or ES cell numbers and/or maintain them in a state where they can be readily reprogrammed to express a particular differentiated phenotype. NABTs of the invention can be used to advantage to prevent iPS or ES cell senescence and to promote stem cell proliferation. Target genes for such an application include but are not limited to p53, Rb, NF-kappa B, Waf-1, AP-1 and certain other gene targets associated with stem cell proliferation and differentiation as listed in Table 11 where the applications include reprogramming normal stem cells (Zeng, Stem Cell Rev 3: 270, 2007). In the case where the NABT to be used for these purposes is an expression vector, it is preferred that the vector not integrate into the host genome. Vectors of this type are well known in the art and documents describing them include but are not limited to the following: Stadtfeld et al., Science 322: 945, 2008; Ren et al., Stem Cells 24: 1338, 2006; and Paz et al., Hum Gene Ther 18: 614, 2007. In the case of conventional antisense oligonucleotides, those combined with cell penetrating peptides such as the arginine-rich peptides described herein, are preferred particularly for treating stem cells propagated in vitro and most particularly for stem cell lines that are being propagated in vitro. This approach avoids the toxic effects of cationic liposomal carriers and facilitates the use of uncharged antisense oligonucleotides such as those with a morpholino replacement of the normal sugar wherein the nucleosides are joined by phosphorodiamidate linkage(s).

[0088] Commercial applications of stem cells along with methods of culturing, tissue engineering and administration for therapeutic purposes are described in the following references: Stem Cell Therapy and Tissue Engineering for Cardiovascular Repair: From Basic Research to Clinical Applications, N Dib, DA Taylor and EB Diethrich (Editors) Springer; 1 edition 2005; Cell Therapy, Stem Cells and Brain Repair, CD Davis and PR Sanberg (Editors) Humana Press; 1 edition 2006; Hematopoietic Stem Cell Therapy, JW Lister, P Law and ED Ball (Editors) Churchill Livingstone, 2000; Stem Cell Therapy for Autoimmune Disease, AM Marmont and RK Burt (Editors) Landes Bioscience; 1 edition 2004; Stem Cell Therapy, EV Greer (Editor) Nova Biomedical Books; 1 edition, 2006; Vodyanik and Slukvin, Curr Protoc Cell Biol, Chapter 23: Unit 23.6, 2007; Desbordes et al., Cell Stem Cell 2: 602, 2008; Wang et al., Blood 105: 4598, 2005; Zhang et al., Stem Cells 24: 2669, 2006; Yao et al., Proc Natl Acad Sci USA 103: 6907, 2006; Peura et al., Theriogenology 67: 32, 2007; Skottman et al., Regenerative Med 2: 265, 2007; Trounson, Ernst Schering Res Found Workshop 54: 27, 2005; Vodyanik and Slukvin, Curr Protoc Cell Biol, Chapter 23: Unit 23.6, 2007; Vodyanik and Slukvin, Meth Mol Biol 407: 275, 2007; Principles of Tissue Engineering, Second Edition, RP Lanza, R Langer and JP Vacanti (Authors) Academic Press; 2 edition, 2000.

[0089] In other embodiments, it may be desirable to reprogram normal cells such that they exhibit improved biological functions or phenotypes. Additional examples of normal cell reprogramming include but are not limited to the following: (1) expanding the population of hematopoietic stem cells to treat medical conditions associated with blood cell deficiencies; (2) expanding cell numbers of some tissue or cell type prior to transplant or to produce increased quantities of cellularly produced molecular products for commercial use.

[0090] Therapeutically relevant cells engineered to have clinically improved phenotypes using the NABTs of the invention can be obtained from the patient to be treated and then may be employed for transplantation of the cells back into the individual (autologous transplant). In an alternative approach, cells may be obtained from another donor (allogeneic transplant) engineered using the NABT described herein and reintroduced into the individual in need of treatment. This embodiment comprises the steps of:
[0091] a) obtaining therapeutically relevant cells from the individual (or donor) and
[0092] b) exposing the therapeutically relevant cells to a reprogramming amount of an NABT capable of altering the expression and/or function of a TR and administering the treated cells to an individual.

[0093] The “Reprogramming Test” will be performed where appropriate to assess combinations and or modifications of the NABTs provided herein. Target gene expression will be assessed in the cells of interest, and the cells contacted with structural variants of the NABTs showing promise to determine their ability to ameliorate symptoms of the medical condition to be treated.

[0094] Desirable reprogramming changes in AP Cells treated with NABTs that inhibit the target genes shown in Table 3 include the following: (1) death or senescence of the AP cells; or (2) a stable change in the phenotype of the AP Cells such that some or all of the pathologic features of the AP Cells are lost. Reprogramming changes in AP Cells treated with NABTs that inhibit the targets shown in Table 5 should produce either a promotion or an inhibition of apoptosis depending on the target. The desired effect will depend on the AP Disease or Programming Disorder to be treated and the effect of the NABT on apoptosis would be the opposite of what is produced by the medical condition as reflected in Table 6A.

[0095] It follows from the AP Model that many “therapeutic solutions” exist for choosing the optimal NABT therapeutic (or combination thereof) to treat AP Diseases and Programming Disorders in accordance with the present invention. That is, several different NABTs—directed against different members of a select set of TR gene targets—may be active in treating the same disease. This situation is a direct consequence of the facts that

[0096] (a) the TRs involved in cellular programming are acting in an interdependent way as part of a combinatorial regulation system, and that

[0097] (b) different TR combinations can direct the same change in cellular programming.

[0098] The Reprogramming Test can be employed to optimize and characterize modifications to the NABTs for the treatment of an AP Disease or Programming Disorder. An exemplary test comprises the following:

[0099] (i) selecting the medical condition in question (Table 2) the subset of TRs and their direct modifiers, listed in Table 3 and/or the apoptosis modulators listed in Table 5, expressed by the AP Cells using both qualitative as well as quantitative measures, where the AP Cells come from patients with said medical condition as well as determining their expression by any appropriate cell lines or AP Cells from any appropriate animal models. Freshly obtained or recently explanted cells or tissues are most preferred for in vitro analysis;

[0100] (ii) comparing the effects of the modified NABT to unmodified NABT indexed in Table 7 (Sequences provided in Table 8 and which in the case of NABTs that are RNAi will be modified as described elsewhere herein) on expression levels of the target TRs and their direct modifiers and/or the apoptosis modulators selected in step (i) and also assessing expression levels in normal cells corresponding to the AP Cells, and/or in normal constitutively self-renewing normal tissue including but not limited to hematopoietic and gastrointestinal or, alternatively, making a similar determination for any other normal tissue that is to be therapeutically manipulated in accordance with this invention;

[0101] (iii) selecting one or more modified NABTs which show efficacious suppression of target gene expression in AP Cells from the relevant patients;

[0102] (iv) treating AP Cells and selected normal cells with NABTs prepared in step (iv) and scoring the effect on target gene expression and on cellular programming; and

[0103] (vi) selecting modified NABTs with desirable properties with respect to the therapeutic goal.

[0104] In a variation of the Reprogramming Test, the test is applied to determining which targets (found in Tables 3 and 5 and shown to be expressed by the cells of interest) and which NABTs (based on oligo sequences in Table 8) are suitable for the therapeutic reprogramming of normal cells including but not limited to normal stem cells as described elsewhere herein. In this embodiment, the AP Cells in the steps just outlined will be replaced by the normal cells of interest. Obviously, in this instance the requirement (found in the application of the Reprogramming Test to AP Diseases and Programming Disorders) that the normal cells of interest have a different TR or their direct modifier profile from the corresponding normal cells is not applicable.

[0105] Pathologic expression of an apoptosis program characterizes certain medical conditions that are not AP Diseases or Programming Disorders, (e.g., when expression of an apoptosis program is induced by an exogenous injury). Several of these are provided in Table 4B. The therapeutic goal in these conditions is to use an NABT to block apoptosis in the normal cells that may be affected via proximity to the injured tissue for example (Table 6B), without inducing concomitant undesirable effects on unaffected normal cells. NABTs suitable for treating these conditions can be assessed using the following steps:

[0106] (i) determining for the medical condition in question (Table 4B) the subset of the apoptosis modulators listed in Table 5, expressed by the affected cells using both qualitative as well as quantitative measures, where the affected cells preferably come from patients with said medical condition as well as determining their expression by similarly affected cell lines or by cells from animal models. Freshly obtained or recently explanted cells or tissues are most preferred for in vitro analysis;

[0107] (ii) determining which of apoptosis modulators detected in step (i) are also expressed by the corresponding unaffected normal tissue, or in unaffected normal constitutively self-renewing normal tissue including but not limited to hematopoietic and gastrointestinal;

[0108] (iii) selecting one or more gene targets for inhibition by NABTs and optionally, modified NABTs, on the basis of it being expressed by affected cells from the relevant patients;

[0109] (iv) preparing appropriate NABTs for the inhibition of said targets using the prototype sequences indexed in Table 7 and provided in Table 8 and which in the case of NABTs that are RNAi will be modified as described elsewhere herein;

[0110] (v) treating the affected cells and selected unaffected normal cells with NABTs prepared in step (iv) and scoring the effect on target gene expression and on cellular programming; and

[0111] (vi) selecting NABTs with desirable properties with respect to the therapeutic goal and further testing variants of these NABTs at step (v) where the variations include small changes in size and hotspot positioning as provided for by Table 8.

[0112] In yet another embodiment, the gene targets selected for inhibition are Molecular Risk Factors for particular medical conditions as shown in Table 11. The sequences for the prototype NABTs and size variants are provided in Table 8 and are indexed in Table 7.

[0113] The direct cause-and-effect associations identified by conventional approaches implicate certain Molecular Risk Factor target genes for therapeutic NABT inhibition. Some examples are the following with more examples provided in Tables 5, 6 and 11:
[0114] (1) β-amyloid precursor protein and apolipoprotein E 4 are causally implicated in the pathogenesis of Alzheimer's Disease;
[0115] (2) vascular endothelial growth factor (VEGF) is causally implicated in cancer, macular degeneration and in rheumatoid arthritis;
[0116] (3) TNF-alpha is causally involved in pathologic inflammatory conditions such as Arthritis, Crohn's Disease, psoriasis, and ankylosing spondylitis;
[0117] (4) TGF-beta is causally involved in fibrosis and Alzheimer's;
[0118] (5) PDGFR is causally involved in cancer and Alzheimer's;
[0119] (6) SGP2, or TRPM-2 is causally involved in cancer and Alzheimer's;
[0120] (7) ERK family members are causally involved in cancer and Alzheimer's;
[0121] (8) COX2 (prostaglandin endoperoxide synthase 2) is causally involved in inflammatory conditions such as arthritis as well as cancer and Alzheimer's, and;
[0122] (9) bax-alpha, bcl-2 alpha, bcl-2 beta, bcl-x, bcl-xl, fas/apo-1, ICE, ICH-1L and MCL-1 are molecules known to be causally involved in the regulation of apoptosis and, therefore, can be blocked by NABTs for the purposes of promoting or inhibiting apoptosis depending on the therapeutic needs of the situation.

[0123] In another embodiment, the present invention involves treating a medical condition with a NABT targeted to TRs or their direct modifiers that are known to regulate the expression of Molecular Risk Factor(s) for said medical condition. Note that the TR Ap-1 is a dimer made up of one jun family member (c-jun, junD, junB) and one fos family member (c-fos, fra-1, fra-2).

[0124] Certain medical conditions, Molecular Risk Factors and TRs as well as their direct modifiers are provided in Table 12 (the corresponding oligo or guide stand sequences for the NABTs listed are provided in Table 8). Some examples are the following: β-amyloid precursor protein and telomerase\human telomerase reverse transcriptase (hTERT) which are implicated in the production of certain disease processes including Alzheimer's and cancer respectively where, for example, the TRs SP1, SP3, SP4, Ap-1 (dimers consisting of jun and fos family members), AP-2, Ap-4, CREB, YY-1, Oct-1, Ets-2 and p53 are among those known to be involved in Alzheimer's and to regulate β-amyloid precursor protein expression; and MAD-1, Ets-2, c-myc, SP1, AP-1 and E2F-1 are involved in the control of telomerase\hTERT expression. Hence, blocking the expression and/or function of TR required for the expression of these medically important molecules will be therapeutically beneficial.

[0125] Genes encoded by the host cell are known to be important for the expression and functioning of infecting viruses. Indeed, blocking the action of NF-kappaB in HIV-infected cells by oligos has been shown to reduce HIV expression. Examples of virally-induced diseases that would benefit from such treatment include, but are not to be limited to, those caused by HIV, HTLV, CMV, herpes viruses, measles viruses, the hepatitis viruses, rhinoviruses, influenza viruses and hemorrhagic fever viruses. Host-encoded genes including, but not limited to TRs as well as their direct modifiers, that are known to regulate the pathogenic viruses and/or to affect pathologic effects on host cells are presented in Table 13 and include the following examples:
[0126] HIV: USF, Elf-1, Ap-1, Ap-2, Ap-4, Sp-1, Sp-3, Sp-4, p53, NF-kappaB, rel, GATA-3, UBP-1, EBP-P, ISGF3, Oct-1, Oct-2, Ets-1, NF-ATC, IRF-1, CDK-1, CDK-2, CDK-3, CDK-4, WAF-1, CDK-4;
[0127] CMV: SRF, NF-kappaB, p53, Ap-1, IE-2, C/EBP, Oct-1, Rb, CDK-1, CDK-2, CDK-3, CDK-4, WAF-1;
[0128] Herpesviruses: USF, Spi-1, Spi-B, ATF, CREB and C/EBP families, E2F-1, YY-1, Oct-1, Ap-1, Ap-2, c-myb, NF-kappaB, CDK-1, CDK-2, CDK-3, CDK-4, Cyclin B, WAF-1;
[0129] Hepatitis viruses: NF-1, Ap-1, Sp-1, RFX-1, RFX-2, RFX-3, NF-kappaB, Ap-2, C/EBP, Oct-1, Ets-2, CDK-1, CDK-2, CDK-3, CDK-4, WAF-1, Rb, E2F-1;
[0130] Influenza viruses: NF-kappaB, p53, YY-1, Ap-1, Oct-1, C/EBP, CDK-1, CDK-2, CDK-3, CDK-4, ERK, ERK-3, WAF-1; and
[0131] Papillomaviruses: CDK-1, CDK-2, CDK-3, CDK-4, WAF-1, ERK, ERK-3

[0132] Guidance relating to the administration or lack of administration of certain drugs with NABTs provided herein. For example, acetaminophen (paracetamol) and/or high dose antioxidants are precluded from use with the NABTs disclosed herein under certain circumstances. A metabolic product of acetaminophen, (NAPQI), binds to endogenous DNA when given to patients or animals and it also binds to bases in NABTs and thus affects their pharmacokinetics and therapeutic efficacy (See U.S. patent application Ser. No. 12/124,943; Rogers et al., Chem. Res. Toxicol. 10: 470, 1997). NAPQI is produced by cytochrome P450 and is highly reactive and, therefore, is short lived and does not leave the cells where it is produced. Accordingly, acetaminophen should not be given to patients receiving an NABT to inhibit gene expression in cells that express those cytochrome P450 isozymes known to produce NAPQI and other reactive metabolites of acetaminophen. Such cells include but are not limited to normal or diseased liver, kidney, lung, gastrointestinal tract, blood and endothelial cells as well as cancer cells. Cytochrome P450 isoenzymes and their pattern of tissue expression is more fully considered in the following: (1) Cytochrome P450: Structure, Mechanism and Biochemistry, PR Ortiz de Montellano, editor, 3^{rd} edition 2004, Springer, New York, N.Y.; and (2) Cytochrome P450: Role in the Metabolism and Toxicity of Drugs and other Xenobiotics, C Ioannides, editor, 1^{st} edition 2008, Royal Society of Chemistry, Cambridge UK.

[0133] Further, high dose antioxidants are known to induce cell cycle arrest, for example, by inducing p21 (12/124,943; Hsu et al., Anticancer Res. 25: 63, 2005; Weng et al., Biochem Pharmacol 69: 1815, 2005). Thus, high dose antioxidants (considered to be a daily dose of >500 on the USDA Oxygen Radical Absorbance Capacity Scale; Cao and Prior, Clin Chem 44: 1309, 1998) should not be given in combination with NABTs where the mechanism of action of the NABT requires the cells being targeted to traverse the cell cycle. This is particularly important, for example, for the treatment of cancer where NABTs used alone or in combination with genome damaging agents, such as many chemotherapeutic agents or ionizing radiation, are used to trigger the death of cancer cells as a result of DNA replication by said cancer cells. The targets for such NABTs for inhibition of expression would include but not be limited to the following genes and their RNA transcripts where each is known to promote cell cycle arrest in cells in response to chemotherapy or radiation: p53, Waf-1, Gadd 45, chk1 and chk2.

[0134] The following references provide more detail on which cancer chemotherapeutics bind to and/or otherwise damage endogenous DNA and, therefore, also damage NABTs. In a separate embodiment the use of the NABTs provided herein for the treatment of cancer in combination with such agents will administered according to dosage regimens that will allow the NABT time to fulfill its therapeutic purpose by avoiding the administration of such DNA damaging agents during this timeframe which is determined by the passage of at least one half-life of the DNA damaging agent(s). These references are incorporated herein by reference: (1) Physicians' Desk Reference (2008) 62nd edition, Thompson Heathcare Brooklyn, N.Y.; (2) Cancer: Principles & Practice of Oncology (2008) 8th edition VT DeVita et al., editors, Lippincott, Williams and Wilkins Philadelphia Pa.; (3) Cancer Medicine (2006) 7th edition DW Kufe editor, BC Decker Inc. Hamilton, Ontario Canada; (4) Cancer Chemotherapy & Biotherapy (2005) 4th edition BA Chabner and DL Longo editors, Lippincott, Williams and Wilkins Philadelphia Pa.; and (5) Goodman & Gilman's The Pharmacological Basis of Therapeutics (2005) 11th edition L Brunton, J Lazo and K Parker, McGraw-Hill New York, N.Y.

[0135] In other embodiments, drugs that affect TR expression and/or function are administered in approximate combination with (e.g., within the time frame of biologic activity) NABTs which modulate cellular programming. Such combinations can act synergistically to treat the disorder in question. Moreover, use in combination often allows use of lower doses than when treating the condition with a single agent. Of course the foregoing assumes such combinatorial approaches in no way inhibit the cellular reprogramming effect of the particular NABT(s).

[0136] Accordingly, other relevant modulators of TR expression and/or function used in conjunction with NABTs have utility for purposes that include but are not limited to the following: (1) To alter cellular programming in medical conditions where certain other drug or NABT modulators of TR expression and/or function are apt to be used in approximate combination with said NABT; and (2) where there is a rationale for using said NABT together with certain other modulators of TR expression and/or function to more effectively achieve a given therapeutic or other commercial purpose than could be achieved by the use of either agent alone. In the instance where said modulator of TR expression and/or function adversely affects said intended therapeutic purpose of a given NABT, then the use of said modulators of TR expression and/or function is contraindicated for use in combination with the NABT. In the instance where said modulator of TR expression and/or function promotes the intended therapeutic purpose of a NABT or establishes a new therapeutic or other commercial use, then the use of said modulators of TR expression and/or function in combination with NABT is indicated.

[0137] For example, NF-kappaB modulators are an important group of drugs that affect TR expression and/or function. NF-kappaB is a TR that plays a role in the regulation of cellular programming but is also active in inflammatory pulmonary, autoimmune, neurodegenerative and cardiovascular diseases as well as in cancer and osteoporosis. The following documents provide numerous examples of such NF-kappaB modulators that are either approved drugs or that are potential drugs in development along with, in many instances, their intended medical uses: Ahn et al., Current Mol Med 7: 619, 2007; Calzado et al., Current Med Chem 14: 367, 2007; O'Sullivan et al., Expert Opin Ther Targets 11: 111, 2007; Abu-Amer et al., Autoimmunity 41: 204, 2008; Uwe, Biochem Pharm 75: 1567, 2008; Guzman et al., Blood 110, 4427, 2007. A sampling of NF-kappaB drug activators includes, but is not limited to, the following: nicotine, anthracyclines (such as idarubicin), cyclohexamide, vinblastine and histone deacetylase inhibitors. A sampling of NF-kappaB drug and nutraceutical inhibitors includes but is not limited to the following: ibuprofen, salicylates, acetaminophen, flurbiprofen, sulindac, high dose antioxidants, IKK inhibitors, protease/proteasome inhibitors, certain anticancer protein kinase inhibitors including but not limited to flt-3 inhibitors, macrolide antibiotics, pentoxifylline, lisophylline, omega 3 fatty acids, rifampicin, statins, erythromycin, clarithromycin, artemisinin, (GSK)-3-beta inhibitor 4-benzyl-2-methyl-1,2,4-thiadiazolidine-3,5-dione (TDZD-8), parthenolide, parthenolide analogs including but not limited to dimethylaminoparthenolide, thalidomide and rolipram.

[0138] For some of these agents, NF-kappa B modulator activity was discovered fortuitously. An example of an approved drug that was developed for other reasons and then found to suppress NF-kappaB is choline magnesium trisalicylate. Cancer patients treated with this drug have been shown to have significantly reduced amounts of NF-kappaB in their cancer cells (Strair et al., Clin Cancer Res 14: 7564, 2008). In this and numerous other studies, NF-kappaB reduction by a variety of agents is associated with an increased sensitivity of cancer cells to conventional anticancer agents. Accordingly, such NF-kappaB inhibitors can be used beneficially in combination with those NABTs of the present invention that sensitize cancer cells to chemotherapy and/or radiation as well as to other agents capable of causing oxidative cellular damage or stress where said NABTs include but are not limited to those that inhibit p53, WAF-1, GADD-45, MCL-1, bcl-2 (alpha and beta), E2F-1, EGFR, BSAP, ID-1, junD, c-myc, Ets-1, Ets-2, KDR/FLK-1, NF-IL6, PDGFR, P1m-1, bcl-x, SGP2 (TRPM-2), TGF-beta, estrogen receptor, androgen receptor and VEGF. In addition the NF-kappaB inhibitors maybe NABTs of the present invention including but not limited to those targeting directly NF-kappaB and those indirectly targeting it for suppression including but not limited to those targeting Ref-1 or Id-1.

[0139] NABTs are commonly used as research reagents, including target validation for drug development, and diagnostics. For example, antisense NABTs are often used by those of ordinary skill in the art to elucidate the function of particular genes including but not limited to elucidating what microRNAs are regulated by what TRs. NABTs are also used, for example, to distinguish between functions of various members of a biological pathway. Antisense inhibition of gene expression has, therefore, been harnessed for research and drug development use.

[0140] Thus, another embodiment of the present invention involves diagnostic methods, NABT chemical and structural variants, and kits comprising the NABTs that are based on the sequences provided in Table 8. Expression patterns within cells or tissues treated with one or more NABT(s) can be compared to control cells or tissues not treated with NABTs and the patterns produced can be analyzed for differential levels of gene expression as they pertain, for example, to disease association, signaling pathways, cellular localizations, expression levels, cell size, cellular morphology, structures or functions of the genes examined. These analyses can be performed on stimulated or unstimulated cells and in the presence or absence of other compounds that affect expression patterns.

[0141] A novel semi-empirical method was developed by the present inventor for selecting the “hotspots” in the gene sequences used in the present invention as well as for selecting the prototype NABT antisense or guide stand sequences based on these hotspots. See Table 8 and guidance provided herein for guide and passenger strands of siRNA or dicer substrates. The most preferred size variants for NABTs are as follows: (1) conventional antisense with a RNase H mechanism of action (20 mers (range 14-34)); (2) conventional antisense with a steric hindrance mechanism with or without added RNase H mechanism of action (22 mers (range 14-34)); (3) siRNA (16 mers (range 14-25)); (4) dicer substrates (25-30 mers); and (5) expression vectors—at least the full length of the corresponding hot spot where the transcript containing said hot spot sequences and generated by the expression vector binds to untranslated exon sequences, a translational start site and/or splice junction in the target gene transcript. Thus, the prototype sequences provided for the latter types of NABTs (siRNA and dicer substrates) will preferably be size adjusted as provided for herein. The prototype sequences set forth in Table 8 were chosen as optimal for conventional antisense with backbone chemistries providing for target binding Tm values at physiologic salt near what is seen for phosphodiesters.

[0142] This semi-empirical method involves plugging in parameters chosen by the present inventor into the “Oligo” program (Version 3.4) created by Dr. Wojciech Rychlik (Rychlik and Rhoads, Nucleic Acids Res. 17: 8543, 1989; copyrighted 1989). These were initially arrived at intuitively and then tested in the lab and modifications made as necessary and the process repeated. This process was repeated until a final set of computer program parameters were identified. This method was then applied to more than 200 different gene sequences to determine the hotspots present in each target gene for which the NABTs of the invention were designed. Preliminary prototype sequences for each hotspot were then subjected to further culling on the basis of criteria chosen by the present inventor. The results are shown in Table 8. Hotspots define the antisense strand (called a guide strand in the case of RNAi) sequences which hybridize to the NABT causing an inhibition of the expression of the targeted gene.

[0143] Reports describing an early version of the AP Model involved the use of conventional antisense oligos to p53. Bayever et al. (Leuk Lymph 12: 223, 1994) have shown, for example, that such NABTs (SEQ ID NOS: 1-4) can be used to inactivate malignant stem cells from patients with acute myelogenous leukemia while not adversely affecting normal hematopoietic stem cells or more mature cells. The specific NABTs used in this study were phosphorothioates without additional modifications. SEQ ID NO: 4 is the subject of numerous other publications that show its anticancer and normal cell sparing effects.

| | | |
|---|---|---|
| SEQ ID NO. 1: | | 5′-AGTCTTGAGC ACATGGGAGG-3′ |
| SEQ ID NO. 2: | | 5′-ATCTGACTGC GGCTCCTCCA-3′ |
| SEQ ID NO. 3: | | 5′-GACAGCATCA AATCATCCAT-3′ |
| SEQ ID NO. 4: | OL(1)p53 | 5′-CCCTGCTCCC CCCTGGCTCC-3′ |

[0144] In addition to phosphorothioate these sequences (SEQ ID 1-4) have also been previously associated with dithioate, methylphosphonate or ethylphosphonate linkages (U.S. Pat. No. 5,654,415 and WO 93/03770).

[0145] These oligos (with SEQ ID NOS: 1-4 comprising the linkages just mentioned) have now been found to target four different “hot spot” regions of the p53 gene transcript which are suitable for attack by multiple different NABTs (e.g., p53 hot spots 14-17 in Table 8). The prototype and size variant sequences in Table 8 that are associated with these hot spots are surprisingly more effective in suppressing p53 expression than the original conventional antisense oligos (described in U.S. Pat. No. 5,654,415 and WO 93/03770) when the backbone chemistry is altered as described below.

[0146] For p53 hot spots 14 (SEQ ID NO: 3786) and 17 (SEQ ID NO: 3797) the most preferred prototype (SEQ ID NOS: 3787-3789 and SEQ ID NOS: 4 and 3789 respectively) and size variant oligo sequences listed in Table 8 are 2′-fluoro gapmers with phosphorothioate linkages, with FANA or LNA gapmers being preferred. More details concerning such gapmer oligos are provided elsewhere herein.

[0147] p53 hot spot 15 includes the primary translational start site for p53 while hot spot 16 includes the secondary translational start site. The present inventor has discovered that the use of certain conventional antisense oligos with a steric hindrance mechanism of action and directed to hot spot 15 or, alternatively combined use such an oligo with an oligo directed to hot spot 16 (Table 23) provides unexpectedly superior inhibitory properties when compared the original oligos having sequences provided in SEQ ID NOS: 2 and 3 with respect to the following: (1) their ability to suppress the expression of the p53 protein; and (2) demonstrating greater efficacy for use in the medical and other commercial applications listed in Table 11. The most preferred oligos for this purpose have 2′-fluoro substituted sugar analogs for all the nucleotides coupled with phosphorothioate linkages. Preferred chemistries for this purpose include the following: (1) morpholino or piperazine sugar substitution in all nucleosides; (2) LNA sugar substitution in all nucleosides with phosphorothioate linkages; and (3) FANA sugar modification in all nucleosides. More details on steric hindrance oligos suitable for use in the present invention are provided elsewhere herein.

[0148] For p53 hot spot 15 (SEQ ID NO: 3790), the associated prototype (SEQ ID NOS: 3791-3793) and corresponding size variant oligo sequences provided in Table 8 can also be used in oligos with an RNase H mechanism of action with surprisingly improved results (compared to the original oligos based on SEQ ID NO: 2). In this embodiment, 2′-fluoro gapmers with phosphorothioate linkages are most preferred. Also preferred are FANA or LNA gapmers. Table 8 lists for each hot spot (presented as an antisense sequence) at least one prototype conventional antisense or prototype RNAi oligo sequence along with a listing of size variant oligo sequences that are suitable for use in NABTs described. Each listing provides the hot spot sequence with each position (numbered right to left) according to the sense reference sequence (numbered left to right) provided along with the size variant antisense oligo sequences. In all sequences, the left most nucleoside is at the 5′ end. The size variant oligo sequences are presented as a number on a line that begins with the position number of the first nucleoside where the number representing the oligo provides the length of the sequence. Thus, the exact sequence for each size variant for each hot spot can be unequivocally read from the corresponding hot spot sequence using the position of the first base and the length of the sequence as provided in the table. The two junD antisense NABTs, H(1)junD (SEQ ID NO. 5) and H(2)junD (SEQ ID NO. 6) and one CREBP-1 antisense NABT, 13L, were tested on cancer cells and shown to have selective toxic activity on cancer cells. The cells tested were (AML blasts freshly obtained from patients and the following cancer cell lines 8226/Dox6, 8226 sensitive and Du-145. 8226 cells are from a patient with multiple myeloma. The D6 version of this line has been selected for doxorubicin resistance in vitro. The DU-145 line is from a patent with prostate cancer. The normal cells tested were bone marrow as described in Bayever et al. Leuk Lymph 12: 223, 1994. In brief, normal human bone marrow cells were incubated with from 10 nM to 10 μM of the NABTs of interest for 7 days. Viable cell counts were performed every two days following NABT treatment and the cells were then plated in mixed colony assays to determine what effects (if any) the NABTs would have on the proliferation and differentiation of various types of hematopoietic colony forming units.

| | | |
|---|---|---|
| SEQ ID NO: 5: | H(1)junD | GTCGGCGTGG TGGTGA |
| SEQ ID NO: 6: | H(2)junD | GCTCGTCGGC GTGGTGGTGA |
| SEQ ID NO: 552 | I3L | GTCCTTGTAT TGCCTGGC |

[0149] A representative example of the suspension culture data for 3 active NABTs is shown in FIG. 1 along with no NABT (medium) and a NABT control directed to an HIV sequence.

[0150] When the H(1)junD and H(2)junD NABTs were tested on malignant cell lines, they were found to have a diminished cytotoxic or anticancer growth-inhibitory effect than they had on freshly-obtained cancer cells. Surprisingly, these antisense NABTs could be used to dramatically sensitize various types of multidrug-resistant cancer cells to anti-cancer chemotherapeutic agents. Remarkably, these sensitizing effects were operative on cancer cells that have differing mechanisms for their multidrug resistance. Table 14 shows that H(1)junD or H(2)junD can be used to sensitize P-glycoprotein-expressing drug-resistant 8226/Dox6 cell line to vincristine, while H(1)junD also can sensitize DU-145 prostate cancer cells that express MRP and not P-glycoprotein (Table 14). These findings support the conclusion that suppressing the expression of junD, such as by treatment with antisense NABTs, can be used to reverse multidrug resistance resulting from multiple mechanisms. In contrast to the effects on multidrug resistant cancer cell lines, the H(1)junD NABT had minimal sensitizing potential when used to treat the drug-sensitive (parent) 8226 cancer cell line.

[0151] Antisense NABT represent a preferred embodiment of the invention. Antisense NABTs include the following: (1) conventional antisense oligos; (2) RNAi including (a) dicer substrates, (b) double stranded siRNA (siRNA) and (c) single stranded siRNA (ss-siRNA); as well as (3) expression vectors. The form of the NABT to be employed will depend on many factors, including: (1) the requirements of the relevant medical condition or commercial use; (2) the relative quality and nature of the various targeting sites for the gene of interest for NABT inhibition; (3) the cell type(s) expressing the gene to be inhibited; (4) the subcellular location(s) in which the relevant NABT concentrates; and (5) the desired duration or the NABT effect. For each parameter, there typically will be a multiplicity of effective NABT compositions that are suitable. Sequences having antisense properties for the three types of NABT listed above are provided in Table 8. When the NABT function as dicer substrates and siRNA, additional information is provided herein addressing modifications for ensuring that the sequences provided in Table 8 will be loaded into RISC as the guide (antisense) stand. Typically there are subtle differences between conventional antisense oligos and the antisense oligos that function in RNAi as guide strands, nevertheless some antisense oligos will have the capacity to function both as a conventional antisense oligo and as an RNAi guide strand.

[0152] Depending on factors considered herein, NABTs may be administered to patients and/or introduced into cells with or without a carrier. NABTs may be administered with or without being conjugated to a moiety that improves one or more of the ADME (absorption, distribution, metabolism and excretion) pharmacological characteristics of the NABT or administered in combination with an agent that improves one or more such ADME parameters. For many in vivo uses, conventional antisense NABTs or ss-siRNAs will be administered without a carrier. In contrast, for most in vivo and for in vitro uses NABTs that are double stranded siRNA or expression vectors will require a carrier. A given carrier may facilitate uptake of the NABT into many cell types or it may be designed such that uptake is cell-type specific. This flexibility allows for a substantial degree of control over which cell types will be subjected to the effects of any given NABT. This could allow, for example, for a given gene to be therapeutically inhibited in one tissue type while not being inhibited in another cell type where such an inhibition would otherwise cause an adverse effect.

[0153] The first conventional antisense oligos to be used clinically contained phosphorothioate backbones without additional modifications. Phosphothioates differ from normal DNA in that they have a sulfur replacing one of the non-bridging oxygens in the phosphodiester linkage. Such phosphorothioates will support RNase H cleavage of their target RNA but this backbone chemistry produces an antisense oligo with a lower binding affinity for its target than normal DNA. As a result, phosphorothioates tend to be less suitable for use in steric hindrance based inhibition methods than a number of other backbone chemistries. Use of phosphorothioate linkages is correlated with increased binding to plasma proteins, particularly albumin. In comparison to a number of other linkages that do not show a high level of binding to plasma proteins, phosphorothioates have prolonged plasma residence times and this in turn promotes tissue uptake.

[0154] Characteristics of phosphorothioates, related use and synthesis methods include, but are not limited to, those provided in the following U.S. Pat. Nos., 5,264,423, 5,276,019, 5,286,717, 5,852,168, 7,098,325, 6,399,831, 5,292,875, 5,003,097, 4,415,732; Zon and Geiser, Anticancer Drug Des 6: 539, 1991. The efficiency of phosphorothioate antisense NABTs can be further improved by the use of synthesis methods that produce oligos with diastereomerically enriched linkages that include, but are not limited to, those described in U.S. Pat. Nos. 5,734,041, 6,596,857, 5,945,521, 6,031,092, and 6,861,518 or where the 5′ and 3′ terminal end internucleoside linkages are chirally Sp and the internal internucleoside linkages are chirally Rp (U.S. Pat. No. 6,867,294).

[0155] The biological activities, particularly for in vivo use, of phosphorothioates as well as the other oligo backbone chemistries (such as but not limited to those with a 2′-fluoro group in at least some sugars or containing at least some FANA or LNA modified sugars and phosphorothioate linkages between at least some nucleosides as described) provided herein may also be improved in tissues and cell types with low oligo uptake by: (1) adding a 500-10,000 MW polyethyleneglycol (PEG) group to the 3′-end and a tocopheryl group to the 5′-end with the lower molecular weight PEG being preferred; or (2) adding a polymer to linked to an oligo at the 3′-end and/or at the 5′-end where the polymer is polyethyleneglycol and/or polyalkylene oxide and further where at least one such polymer has an average molecular weight of 0.05 kg/mol to about 50 kg/mol and where the polymers can be branched or linear. Alternatively, PEG can be replaced by a N-(2-hydroxypropyl)methacrylamide polymer. Characteristics, uses, methods and production of such oligos include but are not limited to those described in Bonora et al., Bioconjugate Chem 8: 793, 1997; Fiedler et al., Langenbeck's Arch Surg 383: 269, 1998; Vorobjev et al., Nucleosides & Nucleotides 18: 2745, 1999; US2005/0019761, WO 2008/077956, WO 01/32623.

[0156] Further modifications to phosphorothioates can provide additional attributes that confer advantages for certain uses. These include certain modifications of the sugars or their replacement by a piperazine ring thereby increasing the binding affinity for the target and in some instances also increasing stability in biological fluids. Modifications for this purpose include the following: (1) locked nucleic acids (LNA) with the alpha-L-LNA being preferred; (2) 2′-fluoro-D-arabinonucleic acids (FANA) with the S-2′F-ANA form being preferred as well as those with a piperazine ring replacing the nucleoside sugar moiety. Most preferred for the present invention is a backbone containing phosphorothioate linkages and ribose sugars modified by replacing the 2′ hydroxyl group with a fluorine moiety where the fluorine (2′ fluoro) is in the normal hydroxyl orientation in contrast to the fluorine orientation in FANA oligos. It is to be understood that the nucleoside or nucleotide monomers of RNA analogs, such as 2′ fluoro correspond to thymine (T) found in DNA may be replaced by the uracil (U) found in RNA. In addition, chimeric 2′-fluoro/2′-O-methoxyethoxy or 2′-O-methoxyethyl oligos are suitable for the practice of the current invention. Such antisense oligos have exceptionally high Tm values.

[0157] In addition to phosphorothioate linkages, other linkages suitable for use in the present invention include, but are not limited to, boranophosphate, phosphoramidate, phosphorodiamidate and phosphorodiamidate with side groups attached to at least some linkages where the side group supplies a positive charge. Boranophosphate linkages can be used with deoxyribose sugars or certain deoxyribose analogs to form backbones that will support RNase H activity. Phosphoramidate, phosphorodiamidate and phosphorodiamidate with side group supplying a positive charge are linkages that have the advantage of increasing the binding affinity of the oligo for its target sequence and are the most preferred linkages for use in conventional antisense morpholino or piperazine oligos that have a steric hindrance mechanism of action.

[0158] Characteristics and synthesis of 2′ fluoro oligos including gapmers are described in, but not limited to, the following: Kawasaki et al., J Med Chem 36: 831, 1993; Cummins et al., Nucleic Acids Res 23: 2019, 1995; Sabahi et al., Nucleic Acids Res 29: 2163, 2001; Monia et al., J Biol Chem 268: 14514, 1993; Blidner et al., Chem Biol Drug Des 70: 113, 2007; Egli et al., Biochem 44: 9045, 2005; Schultz and Gryaznov, Bhat et al., Nucleic Acids Res 52: 69, 2008; WO93/13121, WO97/31009 and WO2007/090073.

[0159] LNA characteristics and synthesis methods include, but are not limited to, those provided in Braasch et al., Biochem 42: 7967, 2003; Jepsen and Wengel, Curr Opinion Drug Dis & Dev 7: 188, 2004; Grunweller et al., 31: 3185, 2003; Pfundheller et al., Methods Mol Biol 288:127, 2005; Gaubert and Wengel, Nucleosides Nucleotides Nucleic Acids 22: 1155, 2003; Wengel et al., Nucleosides Nucleotides Nucleic Acids 22: 601, 2003; Kumar et al., Bioorg Med Chem Lett 18: 2219, 1998; WO0125248, WO07107162, WO04106356, WO03095467, WO03039523, WO03020739, WO0066604, WO0056748, WO9914226, U.S. Pat. No. 7,084,125, U.S. Pat. No. 7,060,809, U.S. Pat. No. 7,053,207, U.S. Pat. No. 7,034,133, US20050287566, US20040014959, U.S. Pat. No. 6,794,499, US20030224377, US20030144231, US20030134808, US20030087230, US20030082807, U.S. Pat. No. 6,670,461, US20020068708, US20040038399, US20050233455, US20050142535. LNA oligos including gapmers and other variants are commercially available from Sigma-Genosys.

[0160] FANA oligo characteristics and synthesis methods include but are not limited to those provided in Ferrari et al., Ann NY Acad Sci 1082: 91, 2006; Wilds and Damha, Nucleic Acids Res 28: 3625, 2000; Lok et al., Biochem 41: 3457, 2002; Min et al., Bioorganic & Med Chem Lett 12: 2651, 2002; Kalota et al., Nucleic Acids Res 34: 451, 2006; US20040038399, US20050233455, US20050142535, WO06096963, WO03064441, WO0220773, WO03037909.

[0161] Characteristics and synthesis of oligos with a piperazine ring substitution for the normal ribose or deoxyribose sugar include, but are not limited to, those described in U.S. Pat. No. 6,841,675 and herein. Piperazine containing oligos (piperazines or piperazine oligos) with phosphodiester, linkages can be used as such or sulfurized to generate phosphorothioate linkages using the standard methods contained in the references and patents listed above. Other suitable linkages for the NABTs containing the piperazine ring in place of the normal furanose ring include, for example, boranophosphate, amide, phosphonamide, phosphorodiamidate; phosphorodiamidate with side group supplying a positive charge, carbonylamide, carbamate, peptide and sulfonamide. Such oligos, with at least one piperazine ring replacing a furanose ring in a nucleoside or nucleotide (preferably with at least four such replacements) and linked by at least one phosphorothioate or boranophosphate and preferably with at least 10 such linkages including those arranged as conventional gapmers are useful conventional antisense NABTs for the practice of the current invention.

[0162] Conventional antisense oligos solely made up of linked LNA, FANA or 2′-fluoro modified nucleoside often exhibit a reduced amount of RNase H activity against their target, if any. One established way to gain RNase H activity in such molecules is to produce gapmers in which the central nucleosides in the NABT have deoxyribose as the preferred sugar moiety, combined with a linkage such as boranophosphate or phosphorothioate that can support RNase H when used as part of a DNA analog. LNA, FANA or 2′ fluoro gapmer NABTs are 16-22mers with phosphorothioate or boranophosphate linkages and a 4-18 nucleoside core flanked by sequences that do not readily support RNase H activity (those containing LNA, FANA or 2′ fluoro containing nucleosides) and which flanking sequences are no more than two nucleosides different in length. The 4-18 nucleoside core uses normal deoxyribose or a suitable analog as the sugar that will support RNase H cleavage of the target RNA to which the oligo is hybridized. Phosphodiester linkages also may be used for in vitro applications where nuclease activity is reduced. Most preferred are 20-mer 2′ fluoro gapmers with an 8 nucleoside core and phosphorothioate linkages throughout as illustrated below. The x's represent different bases (A, G, U/T or C) that are part of a series of linked nucleosides while the capital x's represent nucleosides with 2′ fluoro modifications to the sugar and the small x's represent nucleosides with deoxyribose sugar. The ˜ symbol represents the phosphorothioate linkage. RNA analogs (e.g., 2′ fluoro oligos are typically but not necessarily produced using uracil rather than thymidine bases.

5′-X~X~X~X~X~X~x~x~x~x~x~x~x~x~X~X~X~X~X~X-3′

[0163] Variant gapmers with sugars containing 2′-O-methyl, 2′-O-ethyl, 2′O-methoxyethoxy or 2′-O-methoxyethyl groups in the flanking sequences can also be used but are less preferred than LNA, FANA or 2′ fluoro modifications with the 2′ fluoro modification being most preferred. In addition to the documents provided above, synthetic processes for generating oligos with variable combinations of nucleoside linkages including, but not limited to phosphodiester, phosphorothioate, phosphoramidate and boranophosphate including those for promoting RNase H activity against the RNA target are also presented in WO2004/044136, WO0047593, WO0066609, WO0123613, U.S. Pat. No. 6,207,819 and U.S. Pat. No. 6,462,184.

[0164] In another approach to improve the ability of conventional antisense oligo NABTs to promote RNase H activity against their target, nucleosides with certain base modifications can be inserted at a single position near the center (within 4 nucleosides of either the 5′ or 3′ end) of FANA, LNA, 2′ fluoro or piperazine oligos, as well as at the junction between a series of RNA or RNA-analog nucleoside and a series of DNA or DNA analog nucleoside or the reverse in FANA, LNA, 2′ fluoro, 2′-O-methyl, 2′-O-ethyl 2′-O-methoxyethoxy or 2′-O-methoxyethyl gapmer antisense oligos to achieve or further promote RNase H cleavage of the target RNA. The promotion of RNase H activity by this means appears to be due to added flexibility to the strand that is needed for promoting RNase H activity without interfering with the recognition of the NABT:RNA hybrid as a suitable substrate. The specific base modifications that can be used for this purpose and inserted either at gapmer junctions or near the center of the oligo are selected from the group consisting 4′-C-hydroxymethyl-DNA, 3′-C-hydroxymethyl-ANA, or piperazino-functionalized C3′,02′-linked-ANA where ANA refers to an arabinonucleic acid. Modified nucleotides or nucleotides that can be inserted at gapmer junctions for the purpose of promoting RNase H activity are selected from the group consisting of 2′ fluoro-arabinonucleotides, abasic, tetrahydrofuran (THF). For example, those with the bases shown in Formulas I, II and III, and those with bases selected from Formulas IV-XII or with the structures shown in Formulas XIII-XVII would be suitable for use in the present invention. Formula XVIII shows the structure of THF nucleotides and Formula XIX abasic nucleotides. The specific chemical structure of these base modified nucleosides and the synthesis of oligos containing them include, but are not limited to, those described in Vester et al., Bioorganic & Med Chem Lett 18: 2296, 2008 and US2008/0207541.

[0165] Formulas I-XIX are set forth below:

[chemical structure]

[0166] wherein each of _{R1-8} is independently selected from H, halogen and C₁₋₃ alkyl. R₈ may also be independently selected from fluorine and methyl. In certain embodiments, nucleobase is selected from Formulas IV, V, VI:

[chemical structure]

[0167] or Formulas VII, VIII, IX, X or XI

[chemical structure]

[0168] or formulas XII or XIII:

[chemical structure]

[0169] In some embodiments, the invention provides compounds of the Formula: (T₂)ⱼ-(T₃)ₖ-(T₁)ₘ-(T4)ₙ-(T₁)p-(T₅)_{q}-(T₂)ᵣ

wherein
each T₁ is a T-deoxyribonucleotide;
each T₂ is a nucleotide having a higher binding affinity for a RNA target as compared to the binding affinity of a 2′-deoxyribonucleotide for said RNA target;
each T₃, T₄ and T₅ are transition moietys;
j and r independently are 0 to 10, and together the sum of j and r is at least 2;
m and p independently are 1 to 20, and together the sum of m and p is at least 5;
k, n and q independently are 0 to 3, and together the sum of k, n and q is at least 1.
In some embodiments, T₂ comprises a nucleotide having a northern conformation.
In some such embodiments, T₂ comprises a nucleotide having a 2′-modification.
In some embodiments, j and r are each from 2 to 5, and m is 10 to 16. In some embodiments, j is 2, r is 2 and m is 14-18. In some embodiments, j is 2, r is 2 and m is 16. In some embodiments, j is 4, r is 4 and m is 10-14. In some embodiments, j is 4, r is 4 and m is 12. In some embodiments, j is 5, r is 5 and m is 8-12. In some embodiments, j is 5, r is 5 and m is 10.

[0170] In some embodiments, the invention provides methods of increasing one of the rate of cleavage or the position of cleavage of a target RNA by RNase H comprising:

selecting an oligonucleotide having an RNase H cleaving region and a non-RNase H cleaving region;
selecting a transition moiety capable of modulating transfer of the helical conformation characteristic of an oligonucleotide bound to its 3′ hydroxy to an oligonucleotide bound to its 5′ hydroxyl;
interspacing said transition moiety in said oligonucleotide positioned between said RNase H cleaving region and said non-RNase H cleaving region; and
binding said oligonucleotide to said target RNA in the presence of RNase H.

[0171] In certain embodiments, the oligonucleotide has the Formula: (T₂)ⱼ-(T₃)ₖ-(T₁)ₘ-(T₄)ₙ-(T₁)p-(T₅)_{q}-(T₂)ᵣ

[0172] In certain embodiments, the transition moiety bears a nucleobase having one of the structures IV-XIII, supra.

[0173] Structures of the modifications designed to introduce conformational flexibility (transition moieties) into the heteroduplex include: the propyl (C3), butyl (C4), pentyl (C5) hydrocarbon linkers; tetrahydrofuran (THF), abasic and ganciclovir modifications as well as 2-fluoro-6-methylbenzoimidazole, 4-methylbenzoimidazole, and 2,4-difluorotoluoyl deoxyribonucleotides. Gapmers designed to treat viral diseases responsive to gancyclovir such as those caused by CMV can find added benefit by employing the gancyclovir modification.

[chemical structure]

[chemical structure]

[0174] In yet another approach certain acyclic nucleoside or non-nucleotidic linkers can be inserted respectively in place of, or between, one or two nucleosides at or near the center of otherwise pure FANA, LNA, 2′ fluoro, morpholino, phosphorothioate, boranophosphate, 2′-O-methyl, 2′-O-ethyl, 2′-O-methoxyethoxy or 2′-O-methoxyethyl antisense oligos or their gapmers or into piperazine oligos to achieve or further promote the ability of the NABT to support RNase H cleavage of its target. These linkers also can be placed at the junctions between a series of RNA or RNA-analog nucleoside and a series of DNA or DNA analog nucleoside or the reverse in FANA, LNA, 2′ fluoro, 2′-O-methyl, 2′-O-ethyl 2′-O-methoxyethoxy or 2′-O-methoxyethyl gapmer antisense oligos. These linkers provide added flexibility to the strand needed for promoting RNase H activity without interfering with the recognition of the NABT:RNA hybrid as a suitable substrate. A preferred conventional antisense NABTs for this purpose has FANA modified oligonucleotides while 2′-fluoro oligos with the fluorine in the normal hydroxyl stereochemical configuration are most preferred and the linker to be used is a propyl (C3′), butyl (C4′), pentyl (C5′) or C₃-C₆ alkylene or single peptide bond preferably placed near the middle of the NABT or between one of the next three nucleosides closer to the 3′ end. The specific chemical structure of these linkers, their promotion of RNase H cleavage of the RNA targeted by antisense oligos containing them and the synthesis of such oligos include but are not limited to those described in Vorobjev et al., Antisense & Nucleic Acid Drug Dev 11: 77, 2001; Patureau et al., Bioconjugate Chem 18: 421, 2007; Mangos et al., J AM Chem Soc 125: 654, 2003; WO03037909, US2005/0233455, US2008/0207541.

[chemical structure]

[0175] Published application US2008/0207541 includes the design considerations for using such linkers in hybrid oligos with different regions with two different conformations one of which is consistent with promoting RNase H activity (such as deoxynucleotides) against its target RNA and another region that is not (such as 2′-O-alkoxyalkyl ribonucleotides). The use of such linkers in this context preferably involves locating the linker between regions with conformational differences. In the case of piperazine oligos, these methods can be used to place an acyclic nucleotide, alkyl, oligomethylenediol or oligoethylene glycol linker in an otherwise phosphodiester or phosphorothioate linked oligo or a peptide linker in a peptide linked oligo.

[0176] Of these various methods for improving RNase H activity the most preferred for the present invention are modifications involving conventional antisense 2′ fluoro oligos including those with a gapmer design where the method involves the use of THF or abasic nucleosides or propyl or butyl linkers as described herein and the linkages between the nucleosides are phosphorothioate.

[0177] Boranophosphate linkages can be used in place of phosphorothioate linkages to stabilize conventional antisense NABTs with respect to nuclease attack while also providing for RNase H dependent cleavage of the target RNA in the context of a DNA analog (which in the case of a gapmer may be limited to the central portion of the backbone). The properties and synthesis of boranophosphates include but are not limited to those covered in the following: Li et al., Chem Rev 107: 4746, 2007; Summers and Shaw, Current Med Chem 8: 1147, 2001; Rait and Shaw, Antisense & Nucleic Acid Drug Dev 9: 53, 1999; Shimizu et al., Org Chem 71: 4262, 2006; Wada et al., Nucleic Acids Symp Series 44: 135, 2000; WO00/00499; U.S. Pat. No. 6,160,109, U.S. Pat. No. 5,130,302; U.S. Pat. No. 5,177,198; U.S. Pat. No. 5,455,233; U.S. Pat. No. 5,859,231).

[0178] A second mechanism whereby conventional antisense can inhibit the expression of a particular gene is through steric hindrance. RNA and DNA target sites suitable for conventional antisense oligo attack of this type include 1) primary and secondary translational start sites (oligos in Table 8 that contain a CAT, CAC, CAA, CAG, TAT, CGT or CAG motif where it is understood that T become U in the RNA transcript); 2) 5′-end untranslated sites involved in ribosomal assembly (sequences in Table 8 that occur upstream of the first CAT motif); and 3) sites involved in the splicing of pre-mRNA (SEQ IDS NOS: 2806-2815 in Table 8). A primary translational start site is the one most often used by a particular cell or tissue type. A secondary translational start site is one that is used less often by a particular cell or tissue type. The use of the latter may be determined by natural cellular processes or may be the result of inhibition of the use of the primary translational start site such as would occur when the said cells are treated with an NABT directed to the primary translational start site in question. Thus, the complete inhibition of the expression of a particular gene could require the use of two or more NABTs where one is directed to the primary translational start site and one or more additional NABTs are directed to secondary translational start sites.

[0179] NABT backbone configurations that demonstrate particularly high binding affinities to the target (measured by melting temperature or Tm) are preferred for implementing the steric hindrance mechanism. LNA, FANA, 2′-fluoro, morpholino and piperazine containing backbones are particularly well suited for this purpose. Most preferred are 22-mer 2′ fluoro oligos with phosphorothioate linkages throughout as illustrated below. The x's represent different bases (A, G, U/T or C) that are part of a series of linked nucleosides with 2′ fluoro modifications to the sugar. The ˜ symbol represents the phosphorothioate linkage. In RNA analogs 2′ fluoro oligos typically, but not necessarily, are produced with uracil rather than thymidine bases.

5′-X~X~X~X~X~X~X~X~X~X~X~X~X~X~X~X~X~X~X~X~X~X-3′

[0180] Phosphorothioate and boranophosphate linkages typically lead to a reduction in binding affinity with the target RNA but they may improve pharmacokinetics of an NABT by causing it to bind to plasma proteins. The potential pharmacokinetic advantages provided by these linkages, however, are not necessary in the case of backbones containing morpholino or piperazine substitutions for the sugar.

[0181] In the case of NABTs with other nucleoside chemistries and linkages than phosphorothioate, or boranophosphate, plasma protein binding, however, can be improved by covalently attaching to it, or to a carrier associated with it, a molecule that binds a plasma protein such as serum albumin. Such molecules include, but are not limited, to an arylpropionic acid, for example, ibuprofen, suprofen, ketoprofen, pranoprofen, tiaprofenic acid, naproxen, flurpibrofen and carprofen (U.S. Pat. No. 6,656,730).

[0182] Morpholino oligos are commercially available from Gene Tools LLC. Morpholino oligo characteristics and synthesis include but are not limited to those presented in the following: Summerton and Weller, Antisense Nucleic Acid Drug Dev 7: 187, 1997; Summerton, Biochim Biophys Acta 1489: 141, 1999; Iversen, Curr Opin Mol Ther 3: 235, 2001; U.S. Pat. No. 6,784,291, U.S. Pat. No. 5,185,444, U.S. Pat. No. 5,378,841, U.S. Pat. No. 5,405,938, U.S. Pat. No. 5,034,506, U.S. Pat. No. 5,142,047, U.S. Pat. No. 5,235,033. Morpholino oligos for the purposes of the present invention may have the uncharged and/or at least one cationic linkages between the nucleoside analogs made up of a morpholino ring and a normal base (guanine, uracil, thymine, cytosine or adenine) or a unnatural base as described herein. The preferred linkage for morpholino oligos is phosphorodiamidate which is an uncharged linkage. In some embodiments it may be modified as discussed below to provide a positive charge.

[0183] In one embodiment, the morpholino subunit has the following structure:

### Schematic of a Morpholino Subunit

[chemical structure]

[0185] where Pi is a base-pairing moiety, and the linkages depicted above connect the nitrogen atom of (i) to the 5′ carbon of an adjacent subunit. The base-pairing moieties Pi may be the same or different, and are generally designed to provide a sequence which binds to a target nucleic acid.

[0186] The use of embodiments of linkage types (b1), (b2) and (b3) above to link morpholino subunits may be illustrated graphically as follows:

### Schematic of Linkages for Morpholio Subunit

[chemical structure]

[0188] Preferably, at least 5% of the linkages in an oligo are selected from cationic linkages (b1), (b2), and (b3); in further embodiments, 10% to 35% of the linkages are selected from cationic linkages (b1), (b2), and (b3). As noted above, all of the cationic linkages in an oligo are preferably of the same type or structure.

[0189] In further embodiments, the cationic linkages are selected from linkages (b1′) and (b1″) as shown below, where (b1″) is referred to herein as a “Pip” linkage and (b1″) is referred to herein as a “GuX” linkage:

[0190] In the structures above, W is S or O, and is preferably O; each of R1 and R2 is independently selected from hydrogen and lower alkyl, and is preferably methyl; and A represents hydrogen or a non-interfering substituent on one or more carbon atoms in (b1′) and (b1″). Preferably, each A is hydrogen; that is, the nitrogen heterocycle is preferably unsubstituted. In further embodiments, at least 10% of the linkages are of type (b1′) or (b1″); for example, 20% to 80%, 20% to 50%, or 20% to 30% of the linkages may be of type (b1′) or (b1″). In other embodiments, the oligo contains no linkages of type (b1′). Alternatively, the oligo contains no linkages of type (b1) where each R is H, R³ is H or CH₃, and R⁴ is H, CH₃, or an electron pair.

[0191] In still further embodiments, the cationic linkages are of type (b2), where L is a linker up to 12 atoms in length having bonds selected from alkyl (e.g. —CH₂—CH₂—), alkoxy and alkylamino (e.g. —CH₂—NH—), with the proviso that the terminal atoms in L (e.g., those adjacent to carbonyl or nitrogen) are carbon atoms.

[0192] The morpholino subunits may also be linked by non-phosphorus-based intersubunit linkages, as described further below, where at least one linkage is modified with a pendant cationic group as described above. For example, a 5' nitrogen atom on a morpholino ring could be employed in a sulfamide linkage or a urea linkage (where phosphorus is replaced with carbon or sulfur, respectively) and modified in a manner analogous to the 5'-nitrogen atom in structure (b3) above.

[0193] The subject oligo may also be conjugated to a peptide transport moiety which is effective to enhance transport of the oligo into cells. The transport moiety is preferably attached to a terminus of the oligo.

### Schematic of Attachment of a Cell Penetrating Peptide to Morpholino Backbone

[chemical structure]

[0195] In the structures above, W is S or O, and is preferably O; each of R¹ and R² is independently selected from hydrogen and lower alkyl, and is preferably methyl; and A represents hydrogen or a non-interfering substituent on one or more carbon atoms in (b1′) and (b1″). Preferably, each A is hydrogen; that is, the nitrogen heterocycle is preferably unsubstituted. In further embodiments, at least 10% of the linkages are of type (b1′) or (b1″); for example, 20% to 80%, 20% to 50%, or 20% to 30% of the linkages may be of type (b1′) or (b1″). In other embodiments, the oligo contains no linkages of type (b1′). Alternatively, the oligo contains no linkages of type (b1) where each R is H, R³ is H or CH₃, and R⁴ is H, CH₃, or an electron pair.

[0196] In still further embodiments, the cationic linkages are of type (b2), where L is a linker up to 12 atoms in length having bonds selected from alkyl (e.g. —CH₂—CH₂—), alkoxy (—C—O—), and alkylamino (e.g. —CH₂—NH—), with the proviso that the terminal atoms in L (e.g., those adjacent to carbonyl or nitrogen) are carbon atoms.

[0197] The morpholino subunits may also be linked by non-phosphorus-based intersubunit linkages, as described further below, where at least one linkage is modified with a pendant cationic group as described above. For example, a 5' nitrogen atom on a morpholino ring could be employed in a sulfamide linkage or a urea linkage (where phosphorus is replaced with carbon or sulfur, respectively) and modified in a manner analogous to the 5'-nitrogen atom in structure (b3) above.

[0198] The subject oligo may also be conjugated to a peptide transport moiety which is effective to enhance transport of the oligo into cells. The transport moiety discussed further hereinbelow and is preferably attached to a terminus of the oligo, as shown, for example, in FIG. 3.

[0199] Also preferred are NABTs that comprise a piperazine ring in the place of the ring ribose or deoxyribose sugar. Such analogs are described in U.S. Pat. No. 6,841,675 to Schmidt et al. Methods for synthesizing piperazine based nucleic acid analogs are also disclosed in the '675 patent. Such substitutions improve in vivo bioavailability and exhibit lower aggregation characteristics. The amino acid-derived sidechain functionality denoted R² and R³ in the formula below is unique. This region of the molecule provides useful biological and medicinal applications beyond antisense nucleobase/nucleobase interactions and hydrogen bonding. In some embodiments of the instant invention, nucleoside analogs represented by the following formula are included:

[chemical structure]

[0200] The formula shows the schematic representation of this embodiment with R¹ selected from the group consisting of adenine, thymine, uracil, guanine and cystosine. R² and R³ are side chain groups derived from amino acids and amino acid analogs, or any diastereoisomeric combinations thereof. As such, R² and R³ may be selected from the group consisting of hydrogen and/or all sidechains occurring in the 20 natural amino acids in all isomeric and diastereoisomeric forms and derivatives thereof, such as, but not limited to Serine=CH₂ OH, and Lys=(CH₂)₄ NH₂. In other embodiments, the nucleobase is a nucleobase derivative selected from the group consisting of inosine, fluorouracil, and allyluracil. The nucleobase may further be chosen from a group of nucleobase analogs including daunamycin, and other polycyclic or aromatic hydrocarbon residues known to bind to DNA/RNA.

[0201] In many of these embodiments, the piperazine nucleic acid analogs may be so configured as to be capable of forming a phosphoramidite, sulfonamide, phosphorodiamidate, phosphorodiamidate modified to have a positive charge as described for certain morpholino oligos or carbonylamide backbone linkage. They may also generally be rapidly assembled in a few synthetic steps from commercial grade materials. The length of the linkage between piperazine rings in the NABT of the instant invention may vary from one to four carbons in length, and may be branched or unbranched. The NABTs of the instant invention are also compatible with standard solid phase synthesizers, and may thus be used with synthesizers currently used in the art to allow easy assembly of molecules containing them.

[0202] The invention further comprises amide-, phosphonamide-, carbamate-, and sulphonamide-linked oligos made up of homo-oligonucleotides or comprising a chimera of either DNA or RNA and the nucleoside analogs of the instant invention. In some embodiments, the oligo is a composition containing a number, n, of nucleoside monomers represented by the formula:

[chemical structure]

wherein R¹ is a nucleobase selected from the group consisting of adenine, thymine, uracil, guanine, and cytosine; wherein n is from about 1 to about 30; and wherein the nucleoside monomers are joined by amide-, phosphonamide-, carbamate-, or sulfonamide-linkages. In some of these embodiments, R¹ may be a nucleobase derivative selected from the group consisting of inosine, fluorouracil, and allyluracil. In others, the nucleobase derivative is chosen from a group including daunamycin and other polycyclic or aromatic hydrocarbon residues known to bind to DNA/RNA. In some of these oligonucleotide compositions n is from about 1 to about 30. The invention further includes oligos containing branching from the sidechains of the amino acids, rings of oligos and other tertiary, non-linear structures.

[0203] As previously noted, in some of these oligonucleotide compositions, phosphodiester linkages join the monomers. In some of these, the phosphodiester bonds comprise a linker of between about 1 and about 4 carbons in length. In others the monomers are joined by peptide bonds. In some of these, the peptide bonds comprise a linker of between about 1 and about 4 carbons in length. Finally, in other embodiments, sulfonamide bonds join the monomers. In some of these, the sulfonamide bonds comprise a linker of between about 1 and about 4 carbons in length. In other embodiments, carbamate linkages join the monomers. In some of these, the carbamate bonds consist of a linker of between 1 to 4 carbons in length. Included are also all possible chimeric linkages of the possible structures.

[0204] Since the steric hindrance mechanism is not dependent on RNase H activity, NABTs using this mechanism have the potential to be active in cells where RNase H levels are too low to adequately support conventional antisense oligo effects dependent on this mechanism. Stem cells an early progenitor cells have adequate levels of RNase H for this purpose while cells that have differentiated beyond the stem or progenitor cell stage typically do not. When functional, however, NABTs that support the RNase H based mechanism have the potential advantage over steric hindrance based mechanism of working catalytically since the same NABT molecule is capable of inactivating numerous target RNA molecules. As discussed elsewhere herein it is also possible to modify LNA, FANA, 2′-fluoro, morpholino and piperazine containing backbones to enable or increase their potential to catalyze the cleavage of their target RNA by RNase H by inserting certain linkers, acyclic nucleosides or by using the gapmer approach. Thus, conventional antisense oligos with both potent steric hindrance and RNase H promoting activity can be generated and used for the practice of this invention.

[0205] The availability of antisense NABTs directed to the inhibition of the same target gene by different or overlapping inhibitory mechanisms allows for greater flexibility in treatment options for certain medical disorders. In cancer, for example, RNase H dependent NABTs can be used to attack the malignant stem and progenitor cells while sparing other cells in the cancer. If the success of the treatment requires the malignant stem and progenitor cells to be in cycle there can be an advantage to not attacking the other cells in the cancer because they can promote the proliferation of the malignant stem and progenitor cells. In other instances, rapidly debulking the tumor mass in a patient may be important. Here an antisense NABT with a steric hindrance mechanism would be the agent of choice since it will be operative on a much broader range of cancer cells. If the antisense NABT is intended to protect normal tissues from the toxic effects of conventional cytotoxic cancer therapeutics, then one with a combined RNase H and steric hindrance mechanism may be preferred so that the range of normal cell types is more broadly and thoroughly protected.

[0206] RNAi is suitable for the practice of this invention. Double stranded RNA of 25-30-mer length (dicer substrate) is cleaved intracellularly by the enzyme dicer to form approximately double stranded 21-mers with a two nucleotide (2-nt) overhang on each 3′ end. Such duplexes with the ability to selectively inhibit the expression of particular genes are referred to as siRNA. siRNA can cause specific gene inhibition in cells following loading into RISC and the discarding of one of the double strands (passenger strand). The RISC based mechanism of siRNA action is broadly expressed in cells where it is the same mechanism used for microRNA processing. MicroRNA is known to play a key role in regulating gene expression in all mammalian cell types. siRNA typically inhibits gene expression by targeting RNA transcripts of the gene in question for cleavage by an argonaute enzyme or by translational inhibition without RNA cleavage. siRNA can also directly inhibit gene expression by a mechanism that is not well defined and it can occur in a single stranded form that is distinguishable from conventional antisense oligos by its requirement for an argonaute enzyme for activity.

[0207] Adaptation of RNAi to pharmaceutical use includes the administration of NABTs that generally correspond to different components of the normal RNAi mechanisms. These are dicer substrates, siRNA (double stranded) and ss-siRNA (single stranded siRNA). As discussed more fully below, typical modifications used in the pharmaceutical variants of these molecules typically include backbone modifications to increase stability, base and/or other alterations to ensure that the desired strand will be chosen as the guide strand and the use of a carrier to transport the RNAi NABT into the cytoplasm of cells.

[0208] siRNA has the potential advantage of typically having a catalytic mechanism whereby the guide strand RISC complex causes cleavage of its target RNA and then goes on to cleave additional targets. Therefore, catalytic siRNA is potentially more active in a wider range of cell types than conventional antisense oligos that have an RNase H dependent mechanism. From this point of view, siRNA has a comparable range of cell types as conventional antisense with a steric hindrance mechanism. Conventional antisense oligos with an RNase H dependent mechanism, however, in principle can target anywhere on the pre-mRNA transcript because RNase H activity is usually limited to the nucleus. In contrast, siRNA dependent catalysis by an argonaute enzyme is usually limited to the cytoplasm and as a result the target sequences are limited to mature mRNA.

[0209] Existing RNAi based drugs have disadvantages that include the following: (1) The

[0210] RISC mechanism that is required for the functioning of an RNAi drug is also required for the processing of microRNAs that are essential for normal cellular function. Thus, there is the potential for competition between such RNAi based drugs and microRNA for processing that could result in serious side effects; and (2) Conventional RNAi drug design methods result in guide strands that have relatively modest binding affinities for their target sequences. Thus, they exhibit a lower efficiency of cleavage than could be obtained using higher affinity guide strands. Thus conventional RNAi drugs require greater dosage levels, which in turn increases their likelihood for interfering with microRNA processing. In contrast to the conventional approach, the present invention provides for RNAi NABTs with high affinity guide strands.

[0211] siRNA NABTs for the purposes of this invention will have an antisense or guide strand that are based on hot spot sequences provide in Table 8. The hot spots in the table are written as DNA sequences. When the NABT is an RNAi, the thymine (T) bases should be read as uracil (U) bases. Table 8 provides a list of all of the suitable size variants for the guide strands for each hot spot. The sequence of the passenger strand(s) forming a duplex with the guide strand can be determined on the basis of conventional base pairing A:U and G:C. In the case of 15-mers or 14-mers that are not explicitly listed in the table, it is only necessary to delete one or two nucleotides from the 3′ end of any given 16-mer to arrive at the indicated size. The prototype NABTs shown in this table were designed with conventional antisense mechanisms in mind and are suitable for this purpose.

[0212] siRNAs that function as transcriptional gene silencers range in size from 18-30mers and preferably contain sequences complementary to sequences within 150 bp of the transcriptional start site of the gene to be inhibited. Hot spots in Table 8 particularly preferred for down regulating expression of the p53 gene by targeting portions of SEQ ID NOs 1 and 2806-2815 or their complementary sequence including the corresponding size variants defined by Table 8 as well as sequences that are selected from an 16-30-mer guide strand based on the following sequence (SEQ ID NO: 3630) 5′-CAAAACUUUUAGCGCCAGUCUUGAGCA CAUGGGAGGGGAAAACCCCAAUC-3′ or its complement. Inosine may be substituted for one or two of the four sequential Gs to reduce any g-quartet effects if needed. The antisense sequences listed in Table 8 or their complementary sequences are suitable for NABTs that are transcriptional gene silencers because either of the two DNA sequences that make up particular genes can be targeted. Characteristics, delivery and production of siRNA transcriptional gene silencers are described in Lippman et al., Nature 431: 364, 2004; US2007/0104688.

[0213] siRNA NABTs can be administered to cells as dicer substrates for the purposes of this invention. In this instance, the guide strands selected from Table 8 will be 25-30mers. Once inside the cell, dicer will cleave the 3′ ends of the duplexed stands in a manor that leaves a two nucleotide (2-nt) overhang on the 3′ ends resulting in a potentially functional siRNA. A potential advantage of the administration of dicer substrates over their siRNA counterparts is that the former can be several fold more active in the subnanomolar concentration range. The design considerations for siRNA derived from dicer substrates is basically the same as what is described for administered siRNA with any needed allowances for dicer processing. Characteristics, chemical modifications and production of dicer substrates including their association with peptide carriers often but not necessarily as part of nanoparticles, nanocapsules, nanolattices, microparticles, micelles or liposomes (also see section on carriers below) are described in: Amarzguioui and Rossi, Methods Mol Biol 442: 3, 2008; Collingwood et al., Oligonucleotides 18: 187, 2008; Kim et al., Nature Biotech 23: 222, 2004; US2007/0265220, WO2007/056153, WO2008/022046.

[0214] For the purposes of this invention, the preferred length for siRNA other than dicer substrates or transcriptional gene silencers is a 16-mer duplex with a range of 14-25-mers with a two nucleotide (2-nt) overhang on the 3′ ends so that each preferred strand (guide or passenger) will consist of 18 nucleotides. The overhanging 2-nt are not necessarily required although are preferred and if present they are not typically required for the guide strand binding to its RNA target and consequently Us or Ts can be used as the overhanging bases irrespective of the target RNA sequence. The 5′ end of the guide strand of functional siRNA is phosphorylated. siRNA can be administered in this form or guide strand 5′ end phosphorylation may occur in cells as a result of the action of the Clp1 kinase.

[0215] For the purposes of this invention, the siRNA NABTs based on the hot spots in Table 8 will have two primary design considerations: (1) in the case of double stranded siRNAs, methods to bias loading of the RISC complex with the desired guide strand rather than the desired passenger strand; and (2) methods to stabilize siRNA NABTs in biological fluids without significantly reducing their activity against their RNA or DNA target. The methods for achieving the first objective fall into three main groups that are not mutually exclusive: (1) Blocking the 5′ end of the intended passenger strand, for example with an alkyl group, so that it cannot be phosphorylated by an intracellular kinase (Chen et al., RNA 14: 263, 2008); and/or (2) Using a nicked passenger strand, that is, one that is in effect two (preferably) or more strands that are contiguous when duplexed with the guide strand. In other words, unlike the passenger strands of typical siRNA, there is at least one missing linkage between adjacent nucleosides. Alternatively the passenger strand may have a gap where one or two nucleotides are missing with respect to the formation of a duplex with the guide strand; and/or (3) Selecting guide stands that have a lower Tm for the first 4-nt of their 5′ end as duplexed with the four duplexed nucleotides at the 3′ end of the passenger strand (leaving aside any 2-nt overhang) compared to the 5′ end of the corresponding passenger strand duplexed with the 3′ end of the guide strand (the opposite end of the duplex and leaving aside any 2-nt overhang). Alternatively modifying one or more nucleotides found in the four nucleotides at the 5′ end of the passenger stand to increase its Tm as a duplex with the 3′ end of the guide strand relative to the opposite end of the duplex or decrease the affinity of the four nucleotides at the 3′ end of the passenger stand for the 5′ end of the guide strand relative to the opposite end of the duplex can also be done. The methods for obtaining the second objective involve the use of several of the same types of modifications discussed in the section dealing with conventional antisense oligos. Hence many of the references for defining the synthesis methods and characteristics of the resulting oligos apply to the siRNA variants discussed herein.

[0216] In addition to promoting the loading of the complementary guide strand into RISC, discontinuous passenger strands increase the extent to which the nucleotides in the guide strand can be modified with the types of changes discussed herein for conventional antisense oligos (including but not limited to LNA, FANA, 2′ fluoro and piperazine) without significant loss of activity. The preferred siRNA with a discontinuous passenger strand has a single missing linkage between two nucleosides found within the central six nucleosides of the 16-mer duplex (total of 5 possible linkages any one of which can be eliminated). Further, the binding affinities of the two contiguous passenger strands for their guide strand partner should be at a Tm of least 42° C. The use of multiple LNA, FANA, 2′ fluoro and piperazine modified nucleosides can be used to boost the Tm and to stabilize the siRNA from nuclease attack, a topic discussed in more detail below. It is preferable, however, to have a lower Tm for the 5′ end of the guide stand duplexed with the 3′ end of the adjacent passenger strand as discussed elsewhere. Of these modifications LNA produces the highest increase in Tm with at least a several degree increase extending up to 10° C. being seen for each LNA nucleoside modification. Characteristics and production of siRNA with a discontinuous passenger strand is presented in: Bramsen et al., Nucleic Acids Res 35: 5886, 2007; WO2007/107162 and WO2008/049078.

[0217] The first four duplexed bases at the 5′ end of the desired guide strand, in descending order of importance starting with the terminal base, play an important role in determining which strand in duplexed siRNA will be loaded into the RISC complex as the guide strand. The Tm for this duplex is preferably lower that the Tm for the terminal four base duplex at the other end of the hybrid. This difference can be less than one degree centigrade but with such a small difference it is relatively more important that the two most terminal bases have a lower affinity compared to their counterparts at the other end of the duplex. Tms, including those for duplexes containing various mismatches, can be estimated using nearest neighbor calculations and experimentally determined more exactly using well established methods (Allawi et al., Biochem 36: 10581, 1997; Sugimoto et al., Biochem 25: 5755, 1986; Sugimoto et al., Biochem 26: 4559, 1987; Davis et al., Biochem 46: 13425, 2007; Freier et al., Proc Natl Acad Sci 83: 9373, 1986; Kierzek et al., Biochem 25: 7840, 1986; Freier et al., Biochem 25: 3209, 1986; Peyret et al., Biochem 38: 3468, 1999; Allawi et al., 37: 2170, 1998; Riccelli et al., Biochem 38: 11197, 1999; Bourdelat-Parks and Wartell, Biochem 44: 16710, 2005).

[0218] Table 8 provides for guide strands of lengths from 14-30-mer with 16-mers being preferred the passenger strand is simply the complement of the guide strand with possible overhangs and other possible modifications as described herein. If the first four duplexed bases at the 5′ end of the desired guide strand do not naturally have the relatively reduced Tm discussed above, then one or two base modifications of certain types can be made in the terminal four duplexed bases at the 3′ end of the passenger strand to provide the desired Tm reduction. Such base modifications can involve the introduction of mismatches between normal bases or the introduction of certain so-called “universal bases” which are defined as abnormal bases that can pair with at least two normal bases to form a nucleotide duplex (Hohjoh, FEBS Lett 557: 193, 2004). For the purposes of this invention, universal bases that may be incorporated into NABTs include but are not limited to hypoxanthine (inosine in ribonucleoside form), 5-nitroindole and 3-nitropyrrole. As an alternative to a universal base, a ribose moiety with no base at all can be used (abasic nucleoside) such as but not limited to the abasic spacer 1,2-dideoxyribose. Characteristics and production of oligos containing these and other universal bases and/or abasic sites are discussed in but not limited to the following: (Bergstrom et al., Nucleic Acids Res 25: 1935, 1997; Huang and Greenberg J Org Chem 73: 2695, 2008; Sagi et al., Biochem 40: 3859, 2001; Pompizi et al., Nucleic Acids Res 28: 2702, 2000; Loakes, Nucleic Acids Res 29: 2437, 2001; Watkins and SantaLucia, Nucleic Acids Res 33: 6258, 2005; Wright et al., Biochem 46: 4625, 2007; Loakes and Brown, Nucleic Acids Res 22: 4039, 1994; Van Aerschot et al., Nucleic Acids Res 23: 4363, 1995; Loakes et al., Nucleic Acids Res 23: 2361, 1995; Amosova et al., Nucleic Acids Res 25: 1930, 1997; Seio et al., J Biomol Struct & Dynam 22: 735, 2005; US2007/0254362, US2003/0171315, US2003/0060431, U.S. Pat. No. 6,600,028, U.S. Pat. No. 6,313,286, U.S. Pat. No. 5,438,131, WO2006/093526, WO99/06422, WO98/43991.

[0219] Methods to stabilize siRNA NABTs in biological fluids are essentially the same as those used for conventional antisense oligos, however, certain adjustments are needed to maintain compatibility with the endogenous RNAi and/or siRNA mechanisms that result in RISC loading and subsequent inhibition of target gene expression. A notable exception is the phosphorothioate modification commonly used in conventional antisense oligos to prevent nuclease attack because they do not similarly protect RNA analogs. Nevertheless phosphorothioate linkages can be useful components of RNAi drugs because they promote binding to plasma proteins such as albumin and thus may improve tissue distribution and uptake.

[0220] Generally, most modifications to the passenger strand derived from the guide strand sequences provided in Table 8 will not negatively influence siRNA function typically as long as the duplex retains its A-form-like helical structure. These include the numerous possible modifications at the 2′ position of the pentose sugar that are well tolerated by the siRNA mechanisms and further discussed herein. Such modifications include but are not limited to the addition of a 2′ fluorine atom (2′-fluoro) to the furanose ring in nucleosides in one or more of the passenger or guide strands. Further using nucleosides with alternating 2′-O-methyl with 2′-fluoro modifications or alternating 2′-O-methyl with normal ribose containing nucleotides where the 2′-O-methyl preferably starts at the 5′ terminal nucleoside of the guide strand and is paired to a nucleoside in the passenger strand that does not have a 2′-O-methyl also are suitable for use in the present invention.

[0221] Additional 2′-O-methyl modifications that are suitable for use in this invention include but are not limited to the following guide stand modifications paired with a fully 2′-O-methyl modified passenger strand: (1) 2′-O-methyl modifications to the final two 3′ end duplexed nucleosides; (2) the insertion of 2′ fluoro containing nucleosides at the opposite one-third ends of the strand while avoiding the center one-third (for example, avoid the center 6 nucleosides in a 16-mer duplex with 2-nt overhang) preferably where at least two such modifications occur in the 5′ one-third of the nucleosides and in all of the 3′ one-third; (3) fully phosphorylated with or without the 2′-O-methyl or 2′-fluoro modifications just described. Characteristics of siRNA with 2′-O-methyl or 2′-O-methyl and 2′-fluoro modifications are discussed in but not limited to the following: Allerson et al., J Med Chem 48: 901, 2005; Layzer et al., RNA 10: 766, 2004; WO2004/043977 and WO2004/044133, WO2005/121370, WO2004/043978, WO2005/120230, WO2007/0004665. siRNA that is fully 2′ fluoro substituted is also suitable for the practice of this invention. Characteristics and production of such siRNA is described by Blidner et al., Chem Biol Drug Des 70: 113, 2007.

[0222] LNA modifications suitable for the practice of this invention include but are not limited to the insertion of LNA nucleosides in each of the passenger and guide strands at the opposite one-third ends of the strands that avoid the center one-third (for example, avoid the center 6 nucleosides in a 16-mer duplex with 2-nt overhang) and which also respect the rules described herein that deal with the desirability of having a lower Tm for the duplex at the 5′ end of the guide stand compared to the 5′ end of the passenger strand. Particularly in the case of siRNAs with a discontinuous passenger strand as additional LNA substitutes in these regions are to be preferred. Characteristics of siRNA with LNA modifications are discussed in but not limited to the following: Elmen et al., Nucleic Acids Res 33: 439, 2005; US 2007/0004665, US 2007/0191294, WO2005/073378, WO2007/085485.

[0223] FANA modifications suitable for the practice of this invention include but are not limited to the insertion of FANA nucleosides in one or more of the passenger strand nucleosides and at the opposite one-third ends of the guide strand avoiding the center one-third (for example, avoid the center 6 nucleosides in a 16-mer duplex with 2-nt overhang) and which also respect the rules described herein that deal with the desirability of having a lower Tm for the duplex at the 5′ end of the guide stand compared to the 5′ end of the passenger strand. Particularly in the case of siRNAs with a discontinuous passenger strand, larger numbers of FANA substitutes are to be preferred. Characteristics of siRNA with FANA modifications are discussed in but not limited to the following: Dowler et al., Nucleic Acids Res 34: 1669, 2006; WO2007/048244.

[0224] Alternatively, each of the 2′-O-methyl, LNA or FANA modifications just described can be replaced with nucleosides where a piperazine ring has replaced the furanose to produce antisense NABTs that include those based on sequences in Table 8. In addition to increasing nuclease resistance and improving specific target binding, the piperazine modification is less likely to produce oligos (including but not limited to those configured as a siRNA duplex) that stimulate immune responses such as those mediated by interferon and/or are mediated by toll-like receptors.

[0225] In the case of expression vectors, those suitable for the practice of this invention will produce within target cells antisense sequences that include one or more of the hot spots provided in Table 8 for the gene to be targeted. Preferably, such expression vectors will produce a transcript that includes, but is not limited to an entire hot spot. Such expression vectors may be designed to integrate into the genome of target cells or to function extrachromosomally. In general, integrated vectors are preferred in instances where very long-term target gene suppression is preferable. Integration, however, can infrequently produce alterations in endogenous genes that may become pathogenic. Accordingly, it is generally preferable to not use an expression vector of this type to suppress gene expression in stem cells unless the stem cells are critical to a fatal disease and there is a need for prolonged suppression for therapeutic purposes. Thus, in general it will be preferable to use a non-integrating expression vector when the commercial goal includes suppressing the expression of a particular gene in stem cells. Characteristics and production methods for expression vectors appropriate for use in the present invention include but are not limited to those described in the following: Adriaansen et al. Rheumatology 45: 656, 2006; Vinge et al., Circ Res 102: 1458, 2008; Lyon et al., Heart 94: 89, 2008; Buch et al., Gene Ther 15: 849, 2008; Zentilin and Giacca, Contrib Nephrol 159: 63, 2008; Wang and Pham, Expert Opin Drug Deliv 5: 385, 2008; Mandel et al., Mol Ther 13: 463, 2006; Kordower and Olanow, Exp Neurol 209: 34, 2008; Muller et al., Cardiovasc Res 73: 453, 2006; Warrington and Herzog, Hum Genet 119: 571, 2006; U.S. Pat. No. 7,393,526, U.S. Pat. No. 7,402,308, U.S. Pat. No. 6,309,634, U.S. Pat. No. 6,436,708, U.S. Pat. No. 6,830,920, U.S. Pat. No. 6,174,871, U.S. Pat. No. 6,989,374, U.S. Pat. No. 6,867,196, U.S. Pat. No. 7,399,750, U.S. Pat. No. 6,306,830, U.S. Pat. No. 5,770,580, U.S. Pat. No. 7,175,840, US20070104687, U.S. Pat. No. 7,312,324, U.S. Pat. No. 7,211,248, U.S. Pat. No. 7,001,760, U.S. Pat. No. 5,895,759, WO05021768, WO9506745.

[0226] In addition to viral vectors, many of the carrier mechanisms being applied to siRNA and dicer substrates that are presented herein have their origins as carriers for the transfer of genetically engineered genes into cells in vitro as well as in vivo and are useful for introducing nucleic acids encoding antisense molecules based on the sequences provided in Table 8 into cells where the gene will cause the antisense transcript to be produced.

[0227] When choosing an NABT of the invention for treatment of a pathological disorder, certain factors should be considered. These include: (1) the differentiation stage of the cells containing the gene to be inhibited by the NABT; (2) the desired duration of the NABT therapeutic effect; (3) the function of the specific target sequence in the RNA transcript of the gene to be inhibited; (4) the relative concentration of the NABT in the nuclear and cytoplasmic compartments; and (5) the nature of the desired therapeutic or other commercial use effect. Tables 15, 16 and 17 and the following discussion provide a summary of some of the considerations that can be used to guide NABT selections.

[0228] There is significant overlap between the capabilities of the different types of NABT and, therefore, more than one NABT type can work for any given purpose. The single most important aspect of any NABT is the sequence of its antisense or guide strand and all of the hot spot sequences provided by Table 8 as described herein can be used to generate antisense or guide strand sequences for NABTs with mechanisms involving RNase H, RISC or steric hindrance by expression vectors. The prototype sequences are preferred for use in conventional antisense oligos. Several of these and their hotspots show superior properties and act via a steric hindrance mechanism as described herein.

[0229] In general, the most efficient NABTs are those with RNase H activity, assuming the target cells have sufficient RNase H activity to support their antisense activity. Preferred NABTs for this purpose are shown in Table 15. The reasons for the relatively high efficiency are the following: (1) such NABTs, in the presence of RNase H have catalytic activity leading to the degradation of multiple RNA targets by a single NABT; and (2) conventional antisense oligos do not typically require a carrier for in vitro use unlike dicer substrates or siRNA and as a result uptake into cells is more efficient.

[0230] All of the hotspots and prototypes shown in Table 8 provide suitable sequences for use in conventional antisense oligos with RNase H activity. Adequate RNase H activity is reliably present in stem cells and early (that is early in expressing their differentiation program) progenitor cells while it is uncommon in other cell types. Accordingly, obtaining broader activity than stem cells and early progenitors with respect to the differentiation status of the target cells depends on the use of an NABT with a steric hindrance or RISC dependent mechanism (Tables 15-17).

[0231] Different types of NABT also can be roughly distinguished on the basis of how long they act in cells. Conventional antisense oligos tend to be shorter acting (days to 2-3 weeks) compared to dicer substrates or siRNA (about a month) that in turn are shorter acting than expression vectors (months or even years). With the exception of certain expression vectors that get duplicated during cell division, NABTs are not duplicated by cells so they are degraded and/or in the case of cells that divide, diluted out over time.

[0232] NABTs that affect cellular programming can also impact the duration of their effect on cells as a consequence of their biologic effects. NABTs that promote apoptosis, for example, will have a very short period of action because they kill the cells in which they produce their therapeutic effect. NABTs that promote cellular differentiation that have an RNase H mechanism of action can lose their action on cells by causing them to differentiate and concomitantly loose RNase H activity.

[0233] Thus, NABT type selection is dependent on the therapeutic or other commercial use to which the NABT is to be put. Cancer, for example, is maintained by stem cells and/or early progenitor cells. Further, the desired therapeutic end point is to kill these cells. It follows, therefore, that conventional antisense oligos that support RNase H activity are particularly well suited for treating cancer. If it is desirable to rapidly debulk a cancer then conventional antisense oligos that also have a steric hindrance mechanism may be preferable because they will work in a much broader range of the malignant cells in a given cancer. So it can be anticipated that in some applications that more than one NABT might be required to obtain the best outcome. In contrast to cancer, treatments to block apoptosis in certain chronic diseases, for example, such congestive heart failure or prophylactically protecting tissues from ischemia reperfusion injury typically are better served by longer acting NABTs such as dicer substrates, siRNA or expression vectors compared to conventional antisense oligos.

[0234] The two main subcellular compartments where NABTs carry out their gene inhibitory effects are the nucleus and/or the cytoplasm. Thus, in certain instances it may be desirable to compare the relative levels of any given NABT in these two compartments relative to the site of action of the NABT (Tables 15-17). Other considerations being equal it is important to choose an NABT that preferentially accumulates in the subcellular compartment appropriate to its mechanism. As provided herein there are certain carrier modifications that can direct associated NABTs to particular subcellular compartments as needed.

[0235] In addition, modified NABT backbones suitable for use in the present invention include, for example, chiral phosphorothioates, phosphorodithioates, phosphotriesters, aminoalkylphosphotriesters, methyl and other alkyl phosphonates including 3′-alkylene phosphonates, 5′-alkylene phosphonates and chiral phosphonates, phosphinates, phosphoramidates including 3′-amino phosphoramidate and aminoalkylphosphoramidates, thionophosphoramidates, thionoalkyl-phosphonates, thionoalkylphosphotriesters, selenophosphates and boranophosphates having normal 3′-5′ linkages, 2′-5′ linked analogs of these, and those having inverted polarity wherein one or more internucleotide linkages is a 3′ to 3′, 5′ to 5′ or 2′ to 2′ linkage. NABTs having inverted polarity comprise a single 3′ to 3′ linkage at the 3′-most internucleotide linkage i.e., a single inverted nucleoside residue which may be abasic (the base is missing or has a hydroxyl group in place thereof) are suitable for use in the present invention. Various salts, mixed salts and free acid forms are also included. Representative United States patents that teach the preparation of the above phosphorus-containing linkages include, but are not limited to, U.S. Pat. Nos. 3,687,808; 4,469,863; 4,476,301; 5,023,243; 5,177,196; 5,188,897; 5,264,423; 5,276,019; 5,278,302; 5,286,717; 5,321,131; 5,399,676; 5,405,939; 5,453,496; 5,455,233; 5,466,677; 5,476,925; 5,519,126; 5,536,821; 5,541,306; 5,550,111; 5,563,253; 5,571,799; 5,587,361; 5,194,599; 5,565,555; 5,527,899; 5,721,218; 5,672,697 and 5,625,050.

[0236] Additional modified NABT backbones suitable for use in the present invention that do not include a phosphorus atom therein have backbones that are formed by short chain alkyl or cycloalkyl internucleoside linkages, mixed heteroatom and alkyl or cycloalkyl internucleoside linkages, or one or more short chain heteroatomic or heterocyclic internucleoside linkages. These include those having siloxane backbones; sulfide, sulfoxide and sulfone backbones; formacetyl and thioformacetyl backbones; methylene formacetyl and thioformacetyl backbones; riboacetyl backbones; alkene containing backbones; sulfamate backbones; methyleneimino and methylenehydrazino backbones; sulfonate and sulfonamide backbones; amide backbones; and others having mixed N, O, S and CH₂ component parts.

[0237] Representative United States patents that teach the preparation of the above oligonucleosides include, but are not limited to, U.S. Pat. Nos. 5,034,506; 5,166,315; 5,185,444; 5,214,134; 5,216,141; 5,235,033; 5,264,562; 5,264,564; 5,405,938; 5,434,257; 5,466,677; 5,470,967; 5,489,677; 5,541,307; 5,561,225; 5,596,086; 5,602,240; 5,610,289; 5,602,240; 5,608,046; 5,610,289; 5,618,704; 5,623,070; 5,663,312; 5,633,360; 5,677,437; 5,792,608; 5,646,269 and 5,677,439.

[0238] In other NABTs suitable for use in the present invention both the sugar and the internucleoside linkage, i.e., the backbone, of the nucleotide units are replaced with novel groups. The base units are maintained for hybridization with an appropriate nucleic acid target compound. One such oligo compound, an NABT mimetic that has been shown to have excellent hybridization properties, is referred to as a peptide nucleic acid (PNA). In PNA compounds, the sugar-backbone of an NABT is replaced with an amide containing backbone, in particular an aminoethylglycine backbone. The bases are retained and are bound directly or indirectly to aza nitrogen atoms of the amide portion of the backbone. Representative United States patents that teach the preparation of PNA compounds include, but are not limited to, U.S. Pat. Nos. 5,539,082; 5,714,331; and 5,719,262, each of which is herein incorporated by reference. Further teaching of PNA compounds can be found in Nielsen et al., Science, 1991, 254, 1497-1500. Suitable NABTs with heteroatom backbones, and in particular —CH₂—NH—O—CH₂—, —CH₂—N(CH₃)—O—CH₂— [known as a methylene (methylimino) or MMI backbone], —CH₂—O—N(CH₃)—CH₂—, —CH₂—N(CH₃)—N(CH₃)—CH₂— and —O—N(CH₃)—CH₂—CH₂—[wherein the native phosphodiester backbone is represented as —O—P—O—CH₂—] of the above referenced U.S. Pat. No. 5,489,677, and the amide backbones of the above referenced U.S. Pat. No. 5,602,240.

[0239] Suitable modified NABTs may also contain one or more substituted sugar moieties. Such NABTs may comprise one of the following at the 2′ position: OH; O—, S—, or N-alkyl; O-, S-, or N-alkenyl; O-, S- or N-alkynyl; or O-alkyl-O-alkyl, wherein the alkyl, alkenyl and alkynyl may be substituted or unsubstituted C₁ to C₁₀ alkyl or C₂ to C₁₀ alkenyl and alkynyl. Also suitable are O[(CH2)ₙO]ₘCH₃, O(CH₂)ₙOCH₃, O(CH₂)ₙNH₂, O(CH₂)ₙCH₃, O(CH₂)ₙONH₂, and O(CH₂)ₙON[(CH₂)ₙCH₃)]₂, where n and m are from 1 to about 10. Other suitable NABTs comprise one of the following at the 2′ position: C₁ to C₁₀ lower alkyl, substituted lower alkyl, alkenyl, alkynyl, alkaryl, aralkyl, O-alkaryl or O-aralkyl, SH, SCH₃, OCN, Cl, Br, CN, CF₃, OCF₃, SOCH₃, SO₂CH₃, ONO₂, NO₂, N₃, NH₂, heterocycloalkyl, heterocycloalkaryl, aminoalkylamino, polyalkylamino, substituted silyl, an RNA cleaving group, a reporter group, an intercalator, a group for improving the pharmacokinetic properties of an NABT, or a group for improving the pharmacodynamic properties of an NABT, and other substituents having similar properties. A suitable modification includes 2′-methoxyethoxy (2′-O—CH₂CH₂OCH₃, also known as 2′-O-(2-methoxyethyl) or 2′-MOE) (Martin et al., Helv. Chim. Acta, 1995, 78, 486-504) i.e., an alkoxyalkoxy group. A further suitable modification includes 2′-dimethylaminooxyethoxy, i.e., a O(CH₂)₂ON(CH₃)₂ group, also known as 2′-DMAOE, as described in examples hereinbelow, and 2′-dimethylaminoethoxyethoxy (also known in the art as 2′-O-dimethylaminoethoxyethyl or 2′-DMAEOE), i.e., 2′-O—CH₂—O—CH₂—N(CH₂)₂.

[0240] Other suitable modifications include 2′-methoxy (2′-O—CH₃), 2′-aminopropoxy (2′-OCH₂CH₂CH₂NH₂) and 2′-allyl (2′—CH₂—CH═CH₂), 2′—O-allyl (2′-O—CH₂—CH═CH2). Modifications to the sugar may be in the arabino (up) position or ribo (down) position and may be made at various positions on the sugar, particularly the 3′ position of the sugar on the 3′ terminal nucleotide or in 2′-5′ linked sugars and the 5′ position of 5′ terminal nucleotide sugar. Suitable NABTs may also have sugar mimetics such as cyclobutyl moieties in place of the pentofuranosyl sugar. Representative United States patents that teach the preparation of such modified sugar structures include, but are not limited to, U.S. Pat. Nos. 4,981,957; 5,118,800; 5,319,080; 5,359,044; 5,393,878; 5,446,137; 5,466,786; 5,514,785; 5,519,134; 5,567,811; 5,576,427; 5,591,722; 5,597,909; 5,610,300; 5,627,053; 5,639,873; 5,646,265; 5,658,873; 5,670,633; 5,792,747; and 5,700,920.

[0241] Suitable NABTs may also include nucleobase (often referred to in the art simply as “base”) modifications or substitutions. As used herein, “unmodified” or “natural” bases include the purine bases adenine (A) and guanine (G), and the pyrimidine bases thymine (T), cytosine (C) and uracil (U). Modified bases include other synthetic and natural bases such as 5-methylcytosine (5-me-C), 5-hydroxymethyl cytosine, xanthine, hypoxanthine, 2-aminoadenine, 6-methyl and other alkyl derivatives of adenine and guanine, 2-propyl and other alkyl derivatives of adenine and guanine, 2-thiouracil, 2-thiothymine and 2-thiocytosine, 5-halouracil and cytosine, 5-propynyl (—C—C—CH₃) uracil and cytosine and other alkynyl derivatives of pyrimidine bases, 6-azo uracil, cytosine and thymine, 5-uracil (pseudouracil), 4-thiouracil, 8-halo, 8-amino, 8-thiol, 8-thioalkyl, 8-hydroxyl and other 8-substituted adenines and guanines, 5-halo particularly 5-bromo, 5-trifluoromethyl and other 5-substituted uracils and cytosines, 7-methylguanine and 7-methyladenine, 2-F-adenine, 2-amino-adenine, 8-azaguanine and 8-azaadenine, 7-deazaguanine and 7-deazaadenine and 3-deazaguanine and 3-deazaadenine. Further modified bases include tricyclic pyrimidines such as phenoxazine cytidine(1H-pyrimido[5,4-][1,4]benzoxazin-2(3H)-one), phenothiazine cytidine (1H-pyrimido[5,4-][1,4]benzothiazin-2(3H)-one), G-clamps such as a substituted phenoxazine cytidine (e.g. 9-(2-aminoethoxy)-H-pyrimido[5,4-][1,4]benzoxazin-2(3H)-one), carbazole cytidine (2H-pyrimido[4,5-b]indol-2-one), pyridoindole cytidine (H-pyrido[3′,2′:4,5]pyrrolo[2,3-d]pyrimidin-2-one). Modified bases may also include those in which the purine or pyrimidine base is replaced with other heterocycles, for example 7-deaza-adenine, 7-deazaguanosine, 2-aminopyridine and 2-pyridone. Further bases include those disclosed in U.S. Pat. No. 3,687,808, those disclosed in The Concise Encyclopedia of Polymer Science And Engineering, pages 858-859, Kroschwitz, J. I., ed. John Wiley & Sons, 1990, those disclosed by Englisch et al., Angewandte Chemie, International Edition, 1991, 30, 613, and those disclosed by Sanghvi, Y. S., Chapter 15, Antisense Research and Applications, pages 289-302, Crooke, S. T. and Lebleu, B., ed., CRC Press, 1993. Certain of these bases are particularly useful for increasing the binding affinity of the oligo compounds of the invention. These include 5-substituted pyrimidines, 6-azapyrimidines and N2, N-6 and O-6 substituted purines, including 2-aminopropyladenine, 5-propynyluracil and 5-propynylcytosine. 5-methylcytosine substitutions have been shown to increase nucleic acid duplex stability by 0.6-1.2° C. (Sanghvi, Y. S., Crooke, S. T. and Lebleu, B., eds., Antisense Research and Applications, CRC Press, Boca Raton, 1993, pp. 276-278) and are suitable base substitutions, even more particularly when combined with 2′-O-methoxyethyl sugar modifications.

[0242] Representative United States patents that teach the preparation of certain of the above noted modified bases as well as other modified bases include, but are not limited to, the above noted U.S. Pat. No. 3,687,808, as well as U.S. Pat. Nos. 4,845,205; 5,130,302; 5,134,066; 5,175,273; 5,367,066; 5,432,272; 5,457,187; 5,459,255; 5,484,908; 5,502,177; 5,525,711; 5,552,540; 5,587,469; 5,594,121, 5,596,091; 5,614,617; 5,645,985; 5,830,653; 5,763,588; 6,005,096; 5,681,941, and 5,750,692, each of which is herein incorporated by reference.

[0243] Another modification of the NABTs of the invention involves chemically linking to the NABT one or more moieties or conjugates that enhance the activity, cellular distribution or cellular uptake of the NABT. The compounds of the invention can include conjugate groups covalently bound to functional groups such as primary or secondary hydroxyl groups. Conjugate groups of the invention include intercalators, reporter molecules, polyamines, polyamides, polyethylene glycols, polyethers, groups that enhance the pharmacodynamic properties of oligos, and groups that enhance the pharmacokinetic properties of oligos. Typical conjugates groups include cholesterols, lipids, phospholipids, biotin, phenazine, folate, phenanthridine, anthraquinone, acridine, fluoresceins, rhodamines, coumarins, and dyes. Groups that enhance the pharmacodynamic properties, in the context of this invention, include groups that improve oligo uptake, enhance oligo resistance to degradation, and/or strengthen sequence-specific hybridization with RNA. Groups that enhance the pharmacokinetic properties, in the context of this invention, include groups that improve oligo uptake, distribution, metabolism or excretion. Representative conjugate groups are disclosed in International Patent Application PCT/US92/09196, filed Oct. 23, 1992 the entire disclosure of which is incorporated herein by reference. Conjugate moieties include but are not limited to lipid moieties such as a cholesterol moiety (Letsinger et al., Proc. Natl. Acad. Sci. USA, 1989, 86, 6553-6556), cholic acid (Manoharan et al., Bioorg. Med. Chem. Let., 1994, 4, 1053-1060), a thioether, e.g., hexyl-5-tritylthiol (Manoharan et al., Ann. N.Y. Acad. Sci., 1992, 660, 306-309; Manoharan et al., Bioorg. Med. Chem. Let., 1993, 3, 2765-2770), a thiocholesterol (Oberhauser et al., Nucl. Acids Res., 1992, 20, 533-538), an aliphatic chain, e.g., dodecandiol or undecyl residues (Saison-Behmoaras et al., EMBO J., 1991, 10, 1111-1118; Kabanov et al., FEBS Lett., 1990, 259, 327-330; Svinarchuk et al., Biochimie, 1993, 75, 49-54), a phospholipid, e.g., di-hexadecyl-rac-glycerol or triethylammonium 1,2-di-O-hexadecyl-rac-glycero-3-H-phosphonate (Manoharan et al., Tetrahedron Lett., 1995, 36, 3651-3654; Shea et al., Nucl. Acids Res., 1990, 18, 3777-3783), a polyamine or a polyethylene glycol chain (Manoharan et al., Nucleosides & Nucleotides, 1995, 14, 969-973), or adamantane acetic acid (Manoharan et al., Tetrahedron Lett., 1995, 36, 3651-3654), a palmityl moiety (Mishra et al., Biochim. Biophys. Acta, 1995, 1264, 229-237), or an octadecylamine or hexylamino-carbonyl-oxycholesterol moiety (Crooke et al., J. Pharmacol. Exp. Ther., 1996, 277, 923-937. NABTs of the invention may also be conjugated to active drug substances, for example, aspirin, warfarin, phenylbutazone, ibuprofen, suprofen, fenbufen, ketoprofen, (S)-(+)-pranoprofen, carprofen, dansylsarcosine, 2,3,5-triiodobenzoic acid, flufenamic acid, folinic acid, a benzothiadiazide, chlorothiazide, a diazepine, indomethicin, a barbiturate, a cephalosporin, a sulfa drug, an antidiabetic, an antibacterial or an antibiotic. Oligonucleotide-drug conjugates and their preparation are described in U.S. Pat. No. 6,656,730 that is incorporated herein by reference in its entirety.

[0244] Representative United States patents that teach the preparation of such NABT conjugates include, but are not limited to, U.S. Pat. Nos. 4,828,979; 4,948,882; 5,218,105; 5,525,465; 5,541,313; 5,545,730; 5,552,538; 5,578,717, 5,580,731; 5,580,731; 5,591,584; 5,109,124; 5,118,802; 5,138,045; 5,414,077; 5,486,603; 5,512,439; 5,578,718; 5,608,046; 4,587,044; 4,605,735; 4,667,025; 4,762,779; 4,789,737; 4,824,941; 4,835,263; 4,876,335; 4,904,582; 4,958,013; 5,082,830; 5,112,963; 5,214,136; 5,082,830; 5,112,963; 5,214,136; 5,245,022; 5,254,469; 5,258,506; 5,262,536; 5,272,250; 5,292,873; 5,317,098; 5,371,241, 5,391,723; 5,416,203, 5,451,463; 5,510,475; 5,512,667; 5,514,785; 5,565,552; 5,567,810; 5,574,142; 5,585,481; 5,587,371; 5,595,726; 5,597,696; 5,599,923; 5,599,928 and 5,688,941, each of which is herein incorporated by reference.

[0245] It is not necessary for all positions in a given compound to be uniformly modified, and in fact more than one of the aforementioned modifications may be incorporated in a single compound or even at a single nucleoside within an NABT. The present invention also includes antisense compounds that are chimeric compounds. “Chimeric” antisense compounds or “chimeras,” in the context of this invention, are antisense compounds, particularly NABTs, which contain two or more chemically distinct regions, each made up of at least one monomer unit, i.e., a nucleotide in the case of an NABT compound. These NABTs typically contain at least one region wherein the NABT is modified so as to confer upon the NABT increased resistance to nuclease degradation, increased cellular uptake, and/or increased binding affinity for the target nucleic acid. An additional region of the NABT may serve as a substrate for enzymes capable of cleaving RNA:DNA or RNA:RNA hybrids. By way of example, RNase H is a cellular endonuclease which cleaves the RNA strand of an RNA:DNA duplex. Activation of RNase H, therefore, results in cleavage of the RNA target, thereby greatly enhancing the efficiency of NABT inhibition of gene expression. Consequently, comparable results can often be obtained with shorter NABTs when chimeric NABTs are used, compared to phosphorothioate deoxyoligos hybridizing to the same target region. Cleavage of the RNA target can be routinely detected by gel electrophoresis and, if necessary, associated nucleic acid hybridization techniques known in the art.

[0246] Chimeric antisense compounds of the invention may be formed as composite structures of two or more NABTs, modified NABTs and/or NABT mimetics as described above. Such compounds have also been referred to in the art as hybrids or gapmers. Representative United States patents that teach the preparation of such hybrid structures include, but are not limited to, U.S. Pat. Nos. 5,013,830; 5,149,797; 5,220,007; 5,256,775; 5,366,878; 5,403,711; 5,491,133; 5,565,350; 5,623,065; 5,652,355; 5,652,356; and 5,700,922, each of which is herein incorporated by reference in its entirety.

[0247] The NABTs used in accordance with this invention may be conveniently and routinely made through the well-known technique of solid phase synthesis. Equipment for such synthesis is sold by several vendors including, for example, Applied Biosystems (Foster City, Calif.). Any other means for such synthesis known in the art may additionally or alternatively be employed. It is well known to use similar techniques to prepare NABTs such as the phosphorothioates and alkylated derivatives.

[0248] The compounds of the invention may also be admixed, encapsulated, conjugated or otherwise associated with other molecules, molecule structures or mixtures of compounds, as for example, liposomes, receptor targeted molecules, oral, rectal, topical or other formulations, for assisting in uptake, distribution and/or absorption. Representative United States patents that teach the preparation of such uptake, distribution and/or absorption assisting formulations include, but are not limited to, U.S. Pat. Nos. 5,108,921; 5,354,844; 5,416,016; 5,459,127; 5,521,291; 5,543,158; 5,547,932; 5,583,020; 5,591,721; 4,426,330; 4,534,899; 5,013,556; 5,108,921; 5,213,804; 5,227,170; 5,264,221; 5,356,633; 5,395,619; 5,416,016; 5,417,978; 5,462,854; 5,469,854; 5,512,295; 5,527,528; 5,534,259; 5,543,152; 5,556,948; 5,580,575; and 5,595,756, each of which is herein incorporated by reference.

[0249] The NABTs of the invention encompass any pharmaceutically acceptable salts, esters, or salts of such esters, or any other compound which, upon administration to an animal including a human, is capable of providing (directly or indirectly) the biologically active metabolite or residue thereof. Accordingly, for example, prodrugs and pharmaceutically acceptable salts of the compounds of the invention, pharmaceutically acceptable salts of such prodrugs, and other bioequivalents are also encompassed by the present invention. In addition, conventional antisense NABTs may be formulated for oral delivery (Tillman et al., J Pharm Sci 97: 225, 2008; Raoof et al., J Pharm Sci 93: 1431, 2004; Raoof et al., Eur J Pharm Sci 17: 131, 2002; U.S. Pat. No. 6,747,014; US 2003/0040497; US 2003/0083286; US 2003/0124196; US 2003/0176379; US 2004/0229831; US 2005/0196443; US 2007/0004668; US 2007/0249551; WO 02/092616; WO 03/017940; WO 03/018134; WO 99/60012). Such formulations may incorporate one or more permeability enhancers such as sodium caprate that may be incorporated into an enteric-coated dosage form with the NABT.

[0250] For example, where a NABT is to be expressed, the antisense strand may be operatively linked to a suitable promoter element, for example, but not limited to, the cytomegalovirus immediate early promoter, the Rous sarcoma virus long terminal repeat promoter, the human elongation factor 1α promoter, the human ubiquitin c promoter, etc. It may be desirable, in certain embodiments of the invention, to use an inducible promoter. Non-limiting examples of inducible promoters include the murine mammary tumor virus promoter (inducible with dexamethasone); commercially available tetracycline-responsive or ecdysone-inducible promoters, etc. In specific non-limiting embodiments of the invention, the promoter may be selectively active in cancer cells; one example of such a promoter is the PEG-3 promoter, as described in International Patent Application No. PCT/US99/07199, Publication No. WO 99/49898 (published in English on Oct. 7, 1999); other non-limiting examples include the prostate specific antigen gene promoter (O'Keefe et al., 2000, Prostate 45:149-157), the kallikrein 2 gene promoter (Xie et al., 2001, Human Gene Ther. 12:549-561), the human alpha-fetoprotein gene promoter (Ido et al., 1995, Cancer Res. 55:3105-3109), the c-erbB-2 gene promoter (Takalcuwa et al., 1997, Jpn. J. Cancer Res. 88:166-175), the human carcinoembryonic antigen gene promoter (Lan et al., 1996, Gastroenterol. 111:1241-1251), the gastrin-releasing peptide gene promoter (Inase et al., 2000, Int. J. Cancer 85:716-719). the human telomerase reverse transcriptase gene promoter (Pan and Koenman, 1999, Med. Hypotheses 53:130-135), the hexokinase II gene promoter (Katabi et al., 1999, Human Gene Ther. 10:155-164), the L-plastin gene promoter (Peng et al., 2001, Cancer Res. 61:4405-4413), the neuron-specific enolase gene promoter (Tanaka et al., 2001, Anticancer Res. 21:291-294), the midkine gene promoter (Adachi et al., 2000, Cancer Res. 60:4305-4310), the human mucin gene MUC1 promoter (Stackhouse et al., 1999, Cancer Gene Ther. 6:209-219), and the human mucin gene MUC4 promoter (Genbank Accession No. AF241535), which is particularly active in pancreatic cancer cells (Perrais et al., 2001, J. Biol Chem. 276(33):30923-33).

[0251] Suitable expression vectors include virus-based vectors and non-virus based DNA or RNA delivery systems. Examples of appropriate virus-based gene transfer vectors include, but are not limited to, those derived from retroviruses, for example Moloney murine leulcemia-virus based vectors such as LX, LNSX, LNCX or LXSN (Miller and Rosman, 1989, Biotechniques 7:980-989); lentiviruses, for example human immunodeficiency virus (“HIV”), feline leukemia virus (“FIV”) or equine infectious anemia virus (“EIAV”)-based vectors (Case et al., 1999, Proc. Natl. Acad. Sci. U.S.A. 96: 22988-2993; Curran et al., 2000, Molecular Ther. 1:31-38; Olsen, 1998, Gene Ther. 5:1481-1487; U.S. Pat. Nos. 6,255,071 and 6,025,192); adenoviruses (Zhang, 1999, Cancer Gene Ther. 6(2): 113-138; Connelly, 1999, Curr. Opin. Mol. Ther. 1(5):565-572; Stratford-Perricaudet, 1990, Human Gene Ther. 1:241-256; Rosenfeld, 1991, Science 252:431-434; Wang et al., 1991, Adv. Exp. Med. Biol. 309:61-66; Jaffe et al., 1992, Nat. Gen. 1:372-378; Quantin et al., 1992, Proc. Natl. Acad. Sci. U.S.A. 89:2581-2584; Rosenfeld et al., 1992, Cell 68:143-155; Mastrangeli et al., 1993, J. Clin. Invest. 91:225-234; Ragot et al., 1993, Nature 361:647-650; Hayaski et al., 1994, J. Biol. Chem. 269:23872-23875; Bett et al., 1994, Proc. Natl. Acad. Sci. U.S.A. 91:8802-8806), for example Ad5/CMV-based E1-deleted vectors (Li et al., 1993, Human Gene Ther. 4:403-409); adeno-associated viruses, for example pSub201-based AAV2-derived vectors (Walsh et al., 1992, Proc. Natl. Acad. Sci. U.S.A. 89:7257-7261); herpes simplex viruses, for example vectors based on HSV-1 (Geller and Freese, 1990, Proc. Natl. Acad. Sci. U.S.A. 87:1149-1153); baculoviruses, for example AcMNPV-based vectors (Boyce and Bucher, 1996, Proc. Natl. Acad. Sci. U.S.A. 93:2348-2352); SV40, for example SVluc (Strayer and Milano, 1996, Gene Ther. 3:581-587); Epstein-Barr viruses, for example EBV-based replicon vectors (Hambor et al., 1988, Proc. Natl. Acad. Sci. U.S.A. 85:4010-4014); alphaviruses, for example Semliki Forest virus- or Sindbis virus-based vectors (Polo et al., 1999, Proc. Natl. Acad. Sci. U.S.A. 96:4598-4603); vaccinia viruses, for example modified vaccinia virus (MVA)-based vectors (Sutter and Moss, 1992, Proc. Natl. Acad. Sci. U.S.A. 89:10847-10851) or any other class of viruses that can efficiently transduce human tumor cells and that can accommodate the nucleic acid sequences required for therapeutic efficacy.

[0252] Non-limiting examples of non-virus-based delivery systems which may be used according to the invention include, but are not limited to, “naked” nucleic acids (Wolff et al., 1990, Science 247:1465-1468), nucleic acids encapsulated in liposomes (Nicolau et al., 1987, Methods in Enzymology 1987:157-176), nucleic acid/lipid complexes (Legendre and Szoka, 1992, Pharmaceutical Research 9:1235-1242), and nucleic acid/protein complexes (Wu and Wu, 1991, Biother. 3:87-95).

[0253] Oligos may also be produced by yeast or bacterial expression systems. For example, bacterial expression may be achieved using plasmids such as pCEP4 (Invitrogen, San Diego, Calif.), pMAMneo (Clontech, Palo Alto, Calif.; see below), pcDNA3.1 (Invitrogen, San Diego, Calif.), etc.

[0254] Examples of methods of gene expression analysis useful in conjunction with the present invention are well known in the art (Measuring Gene Expression (2006) M Avison, Taylor & Francis; Advanced Analysis of Gene Expression Microarray Data (2006) A Zhang, World Scientific Publishing Company) and include DNA arrays or microarrays (Brazma and Vilo, FEBS Lett 480: 17, 2000; Celis, et al., FEBS Lett 480: 2, 2000), SAGE (serial analysis of gene expression) (Madden, et al., Drug Discov. Today, 5: 415, 2000), READS (restriction enzyme amplification of digested cDNAs) (Prashar and Weissman, Methods Enzymol. 303: 258, 1999), TOGA (total gene expression analysis) (Sutcliffe, et al., Proc. Natl. Acad. Sci. U.S. A. 97: 1976, 2000), protein arrays and proteomics (Celis, et al., FEBS Lett 480: 2, 2000; Jungblut, et al., Electrophoresis 20: 2100, 1999), expressed sequence tag (EST) sequencing (Celis, et al., FEBS Lett. 480: 2, 2000; Larsson, et al., J. Biotechnol. 80: 143, 2000), subtractive RNA fingerprinting (SuRF) (Fuchs, et al., Anal. Biochem 286: 91, 2000; Larson, et al., Cytometry 41: 203, 2000), subtractive cloning, differential display (DD) (Jurecic and Belmont, Curr Opin Microbiol 3: 316, 2000), comparative genomic hybridization (Carulli, et al., J Cell Biochem Suppl. 31: 286, 1998), FISH (fluorescent in situ hybridization) techniques (Going and Gusterson, Eur J Cancer 35: 1895, 1999) and mass spectrometry methods (reviewed in (To, Comb Chem High Throughput Screen 3: 235, 2000).

[0255] When systemically administered without the use of a carrier, antisense NABTs including conventional antisense oligos, dicer substrates and siRNA, but not expression vectors, have a similar distribution pattern to major organs in the body with liver and kidney taking up the most of these materials and the CNS the least. At subtoxic doses, conventional antisense oligos can be detected in all major tissues including the brain following systemic administration. Further, animal models involving a wide range of targets and tissue types have shown that conventional antisense oligos with variable mechanisms of action (for example RNase H dependence and/or one of various types of steric hindrance) and a variety of backbone chemistries have demonstrable antisense effects against their intended target in vivo when delivered without a carrier. In contrast to conventional antisense oligos, dicer substrates, siRNA and expression vectors typically require the use of a carrier to get them into cells in vivo in the amounts needed for their intended antisense effects. Exceptions for dicer substrates and siRNA may include liver and kidney as well as local administration to sequestered sites such as the eye where the NABT can be retained for a prolonged period.

[0256] Cationic liposomal carriers are often employed in vitro to transfer NABTs including conventional antisense oligos into cell lines to reduce sequestration of naked antisense NABTs in endosomes and certain other intracellular vesicles, thereby increasing the availability of the NABT to bind to the desired target within the cell. Endosomal sequestration of NABTs, however, does occur albeit to a lower degree in vivo.

[0257] There are a number of strategies for increasing the efficiency of conventional antisense oligos in vivo that allow for dose reductions and/or for a given dose to be effective for a longer period of time. Such oligos, for example, are more efficiently delivered to intracellular compartments and appear to exhibit higher activity when they are concatemerized into complexes such as those described by Simonova et al., in Biochim Biophys Acta 1758, 413, (2006); and Gusachenko et al., in Human Gene Ther 19: 532, (2008). This concatemerization can be achieved, in part, by the use of a carrier oligo that binds to the conventional antisense oligo by complementary base pairing. In one embodiment, the ends of the duplex have short over hangs and the carrier oligo optionally includes one or more lipophilic group(s) and/or other groups capable of improving membrane penetration. This enhanced penetration also can be achieved by covalently attaching the lipophilic group(s) (e.g., cholesterol) to the oligo. Alternatively, the lipophilic group can be attached to a “double stranded stopper oligo” with over hangs, one overhang of which binds to the antisense/carrier oligo complex by complementary base pairing while the other strand has the lipophilic group covalently attached to it. In a variant embodiment, the binding affinity of the carrier oligo for the antisense oligo is reduced by means of incorporating mismatches, abasic nucleosides or universal bases (as described elsewhere herein) as necessary to reduce the Tm of the duplex to less than 55° C. when measured under conditions of physiological salt concentrations and pH. These and alternatives to this approach that do not involve the covalent attachment of molecule(s) capable of promoting membrane penetration to the carrier oligo are applicable also to the delivery of dicer substrates or siRNA and are described in the documents provided.

[0258] Packaging RNA (pRNA) can be incorporated into a plurality of chimeric complexes each carrying at least one NABT and used to deliver said NABT to cellular compartments such as the cytoplasm or nucleus where said NABT can perform its intended antisense function. Characteristics, production, methods and uses of pRNA complexes that are suitable for use with the present invention are presented in but not limited to the following: Guo, Methods Mol Biol 300: 285, 2005, Guo, J Nanosci Nanotechnol 5: 1964, 2005; and WO 2007/016507.

[0259] There are also delivery mechanisms applicable to NABTs with or without carriers that can be applied to particular parts of the body such as the CNS. These include the use of convection-enhanced delivery methods such as but not limited to intracerebral clysis (convection-enhanced microinfusion into the brain—Jeffrey et al., Neurosurgery 46: 683, 2000) to help deliver the cell-permeable carrier/NABT complex to the target cells in the CNS as described in WO 2008/033285.

[0260] Drug delivery mechanisms based on the exploitation of so-called leverage-mediated uptake mechanisms are also suitable for the practice of this invention (Schmidt and Theopold, Bioessays 26: 1344, 2004). These mechanisms involve targeting by means of soluble adhesion molecules (SAMs) such as tetrameric lectins, cross-linked membrane-anchored molecules (MARMs) around lipoproteins or bulky hinge molecules leveraging MARMs to cause a local inversion of the cell membrane curvature and formation of an internal endosome, lysosome or phagosome. More specifically leverage-mediated uptake involves lateral clustering of MARMs by SAMs thus generating the configurational energy that can drive the reaction towards internalization of the NABT carrying complex by the cell. These compositions, methods, uses and means of production are provided in WO 2005/074966.

[0261] The various carriers contemplated for use in accordance with the present invention are divided into various categories below, but it is to be understood by the one skilled in the art that some components of these carriers can be mixed and matched. For example, various linkers can be used to attach various peptides of the type described herein to any given NABT and various peptides can be incorporated into particular nanoparticle-based carriers depending on the commercial or clinical purpose to be served.

[0262] Carriers and/or endosomolytic agents can be used to advantage for delivering adequate amounts of conventional antisense oligos and other types of NABTs in vitro or in vivo to certain intracellular compartments such as the nucleus or the cytoplasm and/or in delivering adequate amounts of such agents in vivo to certain tissues such as the following: (1) delivery to the brain, an organ that typically takes up relatively small amounts of NABTs following systemic administration; (2) preferentially concentrating NABTs in particular target organs, such as heart; and (3) increasing the levels of active NABTs in tissues more resistant to NABT uptake due to certain conditions, such as poor vascularization in tumors and disrupted blood supply in ischemia reperfusion injuries; and (4) reducing the dose needed for NABT action, while reducing potential side effect risk(s) in non-target tissues.

[0263] For the purposes of this invention, the preferred carriers, particularly for in vivo use, make use of peptides that promote cell penetration. These cell penetrating peptides (CPPs) typically share a high density of basic charges and are approximately 10-30 amino acids in length. Such peptides may be part of a complex carrier composition, including but not limited to nanoparticles. Alternatively, such CPP peptides may be conjugated to the NABT directly or by means of a linker. Further, CPPs can be fused to, or otherwise associated with peptides that provide other features to NABT carriers such as increasing homing to particular organs, or to particular subcellular compartments. For example, certain peptides described herein may enhance nuclear localization or provide an endosomolytic function (i.e., they function to enhance the escape of NABTs or other drugs from endosomes, lysosomes or phagosomes). CPPs and peptides with other useful carrier functions may be derived from naturally occurring protein domains or synthetic versions may be designed which retain the activity of the naturally occurring versions. Those of human origin include peptide-mimetics such as polyethylenimines. The naturally occurring peptides discussed below have sequence variants, such as those observed in different strains or species or as a result of polymorphisms within species. Thus, the representative peptide sequences provided cannot be considered to be exact and variations in peptide sequences exist between some of the documents referenced. These variants are fully functional and may be used interchangeably.

[0264] Given the relatively small size of most cell penetrating peptides compared to the large size of siRNA, dicer substrates or expression vectors, it is often preferable to employ such peptides in larger carrier structures such as nanoparticles rather than use direct conjugation of the peptide to these NABT types. This approach typically improves the charge ratio and cellular uptake for NABT/carrier complexes. However, an example of a CPP that has been directly and covalently attached to siRNA and shown to promote its uptake by cells is TAT (Chiu et al., Chem Biol 11: 1165, 2004; Davidson et al., J Neurosci 24: 10040, 2004). Delivery of antisense NABTs contained within expression vectors generally will require a viral vector or one of the siRNA or dicer substrate delivery mechanisms as provided for herein.

[0265] Targeting molecules may be operably linked to CPPs thus providing improved NABT uptake in particular cell types. One example of targeting molecules useful for this purpose are those directed to G-protein coupled receptors. Other examples of targeting molecules are ligands to IL-13, GM-CSF, VEGF and CD-20. Other examples of complex structures involved in targeting include nucleic acid aptamers or spiegelmers directed to particular cell surface structures. Characteristics, production uses and methods related to these targeting molecules and complex structures are provided in the following documents: (Nolte et al., Nat Biotech 14: 1116, 1996; McGown et al., Anal Chem 67: 663A, 1995; Pestourie et al., Biochimie 87: 921, 2005; Brody and Gold, J Biotechnol 74: 5, 2000; Mayer and Jenne, BioDrugs 18: 351, 2004; Wolfl and Diekmann, J Biotechnol 74: 3, 2000; Ferreira et al., Tumour Biol 27: 289, 2006; Stoltenburg et al., Anal Bioanal Chem 383: 83, 2005; Rimmele, Chembiochem 4: 963, 2003; Ulrich Handb Exp Pharmacol 173: 305, 2006; Drabovich et al., Anal Chem 78: 3171, 2006; Eulberg and Klussmann, Chembiochem 4: 979, 2003; Vater and Klussmann, Curr Opin Drug Discov Devel 6: 253, 2003; Binkley et al., Nucleic Acids Res 23: 3198, 1995; U.S. Pat. No. 7,329,638, US 2005/0042753, US 2003/0148449, US 2002/0076755, US 2006/0166274, US 2007/0179090, WO 01/81408, WO 2006/052723, WO 2007/137117, WO 03/094973, WO 2007/048019, WO 2007/016507, WO 2008/039173).

[0266] Methods and agents that can be used to bypass endosomal, lysosomal or phagosomal sequestration or used to promote the escape of NABTs from endosomes, lysosomes or phagosomes are optionally administered with the NABT based therapeutics described herein. Such methods include, but are not limited to three approaches that are not mutually exclusive. First, endosomolytic or lysosomotropic agents may be attached to NABTs or included in NABT carrier compositions. Second, lysosomotropic agents may be administered as separate agents at about the time the NABT or carrier/NABT complex is administered in vivo or in vitro. Such lysosomotropic agents include, but are not limited to, the following agents: chloroquine, omeprazole and bafilomycin A. Third, agents that inhibit vacuolar proton ATPase activity (promotes acidification of endosomes, lysosomes or phagosomes) or acidic organelle function may be utilized to sensitize cells to NABT action. Such agents and methods for their administration are provided in U.S. Pat. No. 6,982,252 and WO 03/047350. Such compounds include but are not limited to the following: (1) a bafilomycin such as bafilomycin A1; (2) a macrolide antibiotic such as concanamycin; (3) a benzolacton enamide such as salicilyhalamide A, oximidine or lobatamide; (4) inhibitors of rapamycin, bFGF, TNF-alpha, and/or PMA activated pathways; (5) inhibitors of the class III phosphatidylinositol 3′-kinase signal transduction pathway; and/or (6) antisense NABTs directed to the gene or RNA encoding vacuolar proton ATPase protein.

[0267] Certain lysosomotropic agents such as chloroquine and omeprazole have been used medically, but not as agents for the promotion of NABT activity. These agents exhibit lysosomotropic activity at established doses and treatment regimens both in vivo and in vitro, and thus such studies provide a dosing guide for their use in combination with NABTs to promote NABT activity (Goodman & Gilman's The Pharmacologic Basis of Therapeutics 11^{th} edition Brunton et al., editors, 2006, McGraw-Hill, New York). Other lysosomotropic agents are suitable for in vitro use and dosing studies can be performed according to well established methods known in the art to optimize efficacy when used in combination with NABT therapeutics in vivo. Methods have also been devised that allow chloroquine to be incorporated into carriers or directly conjugated to NABTs for boosting the intended antisense activity of NABTs on cells. These include but are not limited to, those found in US 2008/0051323 and WO2007/040469.

[0268] The molecules listed below are useful as carriers and/or as components of complex carriers for transporting the NABTs of the present invention into cells and into subcellular compartments (in accordance with the guidance provided herein) where they can express their antisense function. Unless otherwise noted these molecules: (1) are CPPs; and/or (2) are useful for achieving NABT function in a wide variety of cell types. Certain of the molecules have been shown to work well in particular cell types or tissues and/or to selectively work with particular cell types or tissues. Such tissues and cell types for which certain of the following molecules have proved to be particularly useful as targeting ligands, carriers or as members of complex carriers include but are not limited to brain, CNS, liver, heart, endothelium, pancreatic islet cells, retina, etc. The biochemical features of the following disclosed peptides and other molecules listed (e.g., increased target cell membrane penetration activity, promotion of endosomolytic activity, activation by to exposure to low pH environments and coding sequence information) are provided in detail below.

(1) TAT and TAT variants—See the following references: (Astriab-Fisher et al., Pharmaceutical Res 19: 744, 2002; Zhao and Weissleder, Med Res Rev 24: 1, 2004; Jensen et al., J Controlled Release 87: 89, 2003; Hudecz et al., Med Res Rev 25: 679, 2005; Meade et al., Adv Drug Delivery Rev 59: 134, 2007; Meade and Dowdy Adv Drug Delivery Rev 60: 530, 2008; Jones et al., Br J Pharmacol 145: 1093, 2005; Gupta et al., Oncology Res 16: 351, 2007; Kim et al., Biochimie 87: 481, 2005; Klein et al., Cell Transplantation 14: 241, 2005; U.S. Pat. No. 6,316,003, U.S. Pat. No. 7,329,638, US 2005/0042753, US 2007/0105775, US 2006/0159619, WO 99/55899, WO 2007/095152, WO 2008/008476, WO 2006/029078, WO 2006/0222657, WO 2008/022046, WO 2006/053683, WO 2004/048545, WO 2008/093982, WO 94/04686)—Tat includes the HIV TAT protein transduction domain and sequences that have been used for this purpose, such as: KRRQRRR (SEQ ID NO: 3631), GYGRKKRRQRRR (SEQ ID NO:3632), YGRKKRRQRRR (SEQ ID NO: 3633), CYGRKKRRQRRR (SEQ ID NO:3634), RKKRRQRRRPPQC (SEQ ID NO: 3635), CYQRKKRRQRRR (SEQ ID NO: 3636) and RKKRRQRRR (SEQ ID NO: 3637). In addition, various amino acid substitutions in TAT have been shown to promote the CPP activity of TAT as disclosed in the referenced documents. TAT can be used as a fusion peptide with enhanced CPP activity where the fusion partner is selected from peptides derived from the following group: (a) HEF from influenza C virus; (b) HA2 and its analogs, see below; (c) transmembrane glycoproteins from filovirus, rabies virus, vesicular stomatitis virus or Semliki Forest virus; (d) fusion polypeptide of sendai virus, human respiratory syncytial virus, measles virus, Newcastle disease virus, visna virus, murine leukemia virus, human T-cell leukemia virus, simian immunodeficiency virus; or (e) M2 protein of influenza A virus.

[0269] TAT and TAT variants have been used successfully to facilitate delivery of therapeutic agents to a wide variety of tissue and cell types that include but are not limited to the following: (a) the CNS and increase penetration of the blood brain barrier. See Kilic et al., Stroke 34: 1304, 2003; Kilic et al., Ann Neurol 52: 617, 2002; Kilic et al., Front Biosci 11: 1716, 2006; Schwarze et al., Science 285, 1569, 1999; Banks et al., Exp Neurol 193: 218, 2005; and WO 00/62067; (b) TAT peptides have also been shown to effectively penetrate heart tissue. See Gustafsson et al., Circulation 106: 735, 2002; (c) TAT or TAT/PDT are described in Embury et al., Diabetes 50: 1706, 2001; and Klein et al., Cell Transplantation 14: 241, 2005. These investigators disclose that such peptides are useful for delivery of desired agents to pancreatic islet cells; (d) Schorderet et al., Clin Exp Ophthalmology 33: 628, 2005 describe the use of D-TAT which is the retro-inverso form of TAT for delivery of agents to the retina and thus this peptide is also useful in the methods disclosed herein.

(2) MPG peptide—See the following references. (Morris et al., Nucleic Acids Res 25: 2730, 1997; Simeoni et al., Nucleic Acids Res 31: 2117, 2003; Hudecz et al., Med Res Rev 25: 679, 2005; Deshayes et al., Adv Drug Delivery Rev 60: 537, 2008; WO 2006/053683, WO 2004/048545)—Delivery systems using this CPP make combined use of a sequence that is derived from the fusion sequence of the HIV protein gp41, the sequence including for example, GALFLGF(or W)LGAAGSTMGA (SEQ ID NO:3638) or the longer peptide sequence GALFLGF(or W)LGAAGSTMGAWSQPKKKRKV (SEQ ID NO:3639) when the goal is to achieve higher levels nuclear transport of the NABT. Nuclear concentration is most suitable for conventional antisense oligos that have an RNase H mechanism of action or those that interfere with splicing by means of a steric hindrance mechanism as well as for siRNA that functions as a transcriptional inhibitor and for expression vectors. An alternative form of the longer MPG peptide where the second lysine is replaced by a serine (GALFLGF(or W)LGAAGSTMGAWSQPKSKRKV; (SEQ ID NO: 3640) causes the transported NABT to preferentially localize in the cytoplasm. This is most suitable for conventional antisense oligos that interfere with translation by a steric hindrance mechanism or for siRNA that function via interfering with translation, as well as for most dicer substrates or siRNA. In the MPG delivery system, these peptides are incorporated into nanoparticles that combine with NABTs by charge/charge interaction.
(3) Penetratin and EB1—See the following references. (Astriab-Fisher et al., Pharmaceutical Res 19: 744, 2002; Hudecz et al., Med Res Rev 25: 679, 2005; Lindgren et al., Bioconjugate Chem 11: 619, 2000; Meade et al., Adv Drug Delivery Rev 59: 134, 2007; Meade and Dowdy Adv Drug Delivery Rev 60: 530, 2008; Jones et al., Br J Pharmacol 145: 1093, 2005; Lundberg et al., FASEB J 21: 2664, 2007; U.S. Pat. No. 7,329,638, US 2005/0042753, US 2007/0105775, WO 2007/095152, WO 2008/008476, WO 2006/029078, WO 2006/0222657, WO2008/022046, WO 2006/053683, WO 2004/048545, WO 2008/093982)—Penetratin sequences include but are not limited to the following: RQIKIWFQNRRMKWKK (SEQ ID NO: 3641) and RQIKIWFQNRRMKWKKGGC (SEQ ID NO:3642). EB1 which has been modified from penetratin in part by inserting histidine residues in strategic spots in the peptide in order to add increased endosomolytic activity to the parent CPP. EB1 sequences include but are not limited to the following: LIRLWSHLIHIWFQNRRLKWKKK (SEQ ID NO:3643) Penetratin or EB1 can be used as a fusion peptide with enhanced CPP activity where the fusion partner is selected from peptides derived from the following group: (a) hemagglutinin esterase fusion protein (HEF) from influenza C virus; (b) HA2 and its analogs, see below and as an example of such a fusion peptide the following sequence: GLFGAIAGFIENGWEGMIDGRQIKIWFQNRRMKWKK (SEQ ID NO: 3644); (c) transmembrane glycoproteins from filovirus, rabies virus, see below, vesicular stomatitis virus or Semliki Forest virus; (d) fusion polypeptide of sendai virus, FFGAVIGTIALGVATA SEQ ID NO: 3645) human respiratory syncytial virus, FLGFLLGVGSAIASGV (SEQ ID NO: 3646), HIV gp41, GVFVLGFLGFLATAGS (SEQ ID NO: 3647), ebola GP2, GAAIGLAWIPYFGPAA, (SEQ ID NO: 3648) See WO 2008/022046), measles virus, Newcastle disease virus, visna virus, murine leukemia virus, human T-cell leukemia virus, simian immunodeficiency virus; or (e) M2 protein of influenza A virus.
(4) VP22—See the following references. (Suzuki et al., J Mol Cell Cardiology 36: 603, 2004; Hudecz et al., Med Res Rev 25: 679, 2005; Meade et al., Adv Drug Delivery Rev 59: 134, 2007; Meade and Dowdy Adv Drug Delivery Rev 60: 530, 2008; Jones et al., Br J Pharmacol 145: 1093, 2005; Xiong et al., BMC Neuroscience 8: 50, 2007; Lemken et al., Mol Ther 15: 310, 2007; Bamdad and Bell, Iran Biomed J 11: 53, 2007; Greco et al., Gene Ther 12: 974, 2005; Aints et al., J Gene Med 1: 275, 1999; U.S. Pat. No. 7,329,638, US 2005/0042753, US 2007/0105775, WO 2007/095152, WO 2008/008476, WO 2006/029078, WO 2006/0222657, WO2008/022046, WO 2006/053683, WO 2004/048545)—VR22 sequences include for example: DAATATRGRSAASRPTERPRAPARSASRPRRPVD (or E) (SEQ ID NO: 3649). In addition to being a potent CPP suitable for use with a wide variety of tissue and cell types, VP22 has the added ability to shuttle the NABT to secondary cells after having delivered it to an initial set of cells. VP22 can be used as a fusion peptide with enhanced CPP activity where the fusion partner is selected from peptides derived from the following group: (a) HEF from influenza C virus; (b) HA2 and its analogs; (c) transmembrane glycoproteins from filovirus; rabies virus, vesicular stomatitis virus or Semliki Forest virus; (d) fusion polypeptide of sendai virus, human respiratory syncytial virus, measles virus, Newcastle disease virus, visna virus, murine leukemia virus, human T-cell leukemia virus, simian immunodeficiency virus; or (e) M2 protein of influenza A virus.

[0270] VP22 has been shown to facilitate penetration of the blood brain barrier. See Kretz et al., Mol Ther 7: 659, (2003). VP22 can also be employed to deliver NABTs to heart tissue. See Suzuki et al., J Mol Cell Cardiology 36: 603, 2004. Xiong et al., Hum Gene Ther 18: 490, 2007 report that VP22 peptides also have utility for targeting skeletal muscle. Kretz et al., Mol Ther 7: 659, 2003 have described the use of VP22 peptides for facilitating delivery to the retina.

(5) Model amphipathic peptide (MAP)—See the following references. (Hudecz et al., Med Res Rev 25: 679, 2005; Meade et al., Adv Drug Delivery Rev 59: 134, 2007; Meade and Dowdy Adv Drug Delivery Rev 60: 530, 2008; Jones et al., Br J Pharmacol 145: 1093, 2005; Drin et al., AAPS PharmSci 4: 1, 2002, WO2008/022046, WO 2004/048545, WO 2008/093982)—MAP has broad application as a CPP and its peptide sequences include, but are not limited to, KLAKLLALKALKAALKLA (SEQ ID NO: 3650) and KLALKLALKALKAALKLA (SEQ ID NO: 3651).
(6) Pep-1—See the following references. (Morris et al., Nature Biotech 19: 1173, 2001; Kim et al., J Biochem Mol Biol 39: 642, 2006; Choi et al., Mol Cells 20: 401, 2005; An et al., Mol Cells 25: 55, 2008; Munoz-Morris et al., Biochem Biophys Res Commun 355: 877, 2007; Choi et al., Free Radic Biol Med 41: 1058, 2006; Cho et al., Neurochem Int 52: 659, 2008; An et al., FEBS J 275: 1296, 2008; Lee et al., BMB Rep 41: 408, 2008; Yune et al., Free Radic Biol Med published online ahead of print Jul. 27, 2008; Eum et al., Free Radic Biol Med 37: 1656, 2004; Weller et al., Biochem 44: 15799, 2005; Choi et al., FEBS Lett 580: 6755, 2006; Gros et al., Biochim Biophys Acta 1753: 384, 2006; US 2003/0119725, U.S. Pat. No. 6,841,535, US 2007/0105775, WO 2008/093982)—Pep-1 sequences include, but are not limited to, KETWWETWWTEWSQPKKKRKV (SEQ ID NO: 3652). Pep-1 is a CPP that can be operably linked to nanoparticles capable of delivery of NABTs to the cytoplasm of cells.

[0271] In addition to numerous other tissues and cell types, Pep-1 can be successfully used as a CPP for the delivery of NABTs and other large charged molecules to intracellular compartments of brain and spinal cord and cells. Such uses include the NABT treatment of various neurological disorders including but not limited to the following: ischemia-reperfusion injury (including stroke), spinal cord injury amyotrophic lateral sclerosis and Parkinson's Disease.

(7) Pep-1 Related Peptides—See the following US patent applications and issued patent. (US 2003/0119725, U.S. Pat. No. 6,841,535, US 2007/0105775)—Pep-1 belongs to a series of related CPPs that are effective carriers or carrier components for the delivery of potent NABTs into intracellular compartments. Pep-2 has the sequence KETWFETWFTEWSQPKKKRKV (SEQ ID NO: 3653). Two amino acid sequence patterns have been observed in closely related peptides with CPP activity. In these peptides, the term Xaa refers to a position in the sequence where either any amino acid or no amino acid is acceptable. The sequence pattern that includes Pep-1 is the following: KXaaXaaWWETWWXaaXaaXaaSQPKKXaaRKXaa (SEQ ID NO: 3654). Additional peptides in this family include the following sequences: KETWWETWWTEWSQPKKRKV (SEQ ID NO: 3655), KETWWETWWTEASQPKKRKV (SEQ ID NO: 3656), KETWWETWWETWSQPKKKRKV (SEQ ID NO: 3657), KETWWETWTWSQPKKKRKV (SEQ ID NO: 3658) and KWWETWWETWSQPKKKRKV (SEQ ID NO: 3659). The closely related pattern is as follows: KETWWETWWXaaXaaWSQPKKKRKV (SEQ ID NO: 3660).
(8) Fusion sequence-based protein (FBP)—See the following references. (Hudecz et al., Med Res Rev 25: 679, 2005; Drin et al., AAPS PharmSci 4: 1, 2002; WO 2004/048545)—FBP peptide sequences include but are not limited to GALFLGWLGAAGSTM (SEQ ID NO: 3661) and GALFLGWLGAAGSTMGAWSQPKKKRKV (SEQ ID NO: 3662) where the second sequence ends with a nuclear localization sequence from SV40 T antigen.
(9) bPrPp—See Hudecz et al., Med Res Rev 25: 679, 2005; Magzoub et al., Biochim Biophys Acta 1716: 126, 2005; Magzoub et al., Biochem 44: 14890, 2005; Magzoub et al., Biochem Biophys Res Commun 348: 379, 2006; and Biverstahl et al., Biochem 43: 14940, 2004). bPrPp is a CPP based on peptides that are found in bovine prions and includes the following sequence: MVKSKIGSWILVLFVAMWSDVGLCKKRPKP (SEQ ID NO: 3663). This peptide has endosomolytic as well as CPP activity.
(10) PG-1 (peptide protegrin)—See Drin et al., AAPS PharmSci 4: 1, 2002 Adenot et al., Chemotherapy 53: 73, 2007; U.S. Pat. No. 7,399,727). —PG-1 is a CPP originally isolated from porcine leukocytes. Use of PG-1 peptides to deliver the NABTs of the invention enhances intracellular delivery thereof. Such PG-1 containing molecules are sometimes referred to as SynB vectors. These vectors typically employ protegrin based peptides of varying lengths, for example, SynB1 (RGGRLSYSRRRFSTSTGR; (SEQ ID NO: 3664) and SynB3 (RRLSYSRRRF; (SEQ ID NO:3665).

[0272] In addition to numerous other tissue and cell types, PG-1 and SynB vectors comprising CPPs based on Syn B family peptides can be used to increase transport of NABTs across the blood brain barrier.

(11) Transportan and analogues such as TP-7, TP-9 and TP-10—See the following references. (Soomets et al., Biochim Biophys Acta 1467: 165, 2000; Hudecz et al., Med Res Rev 25: 679, 2005; Fisher et al., Gene Ther 11: 1264, 2004; Rioux, Curr Opin Investig Drugs 2: 364, 2001; E1-Andaloussi et al., J Control Release 110: 189, 2005; Lindgren et al., Bioconjugate Chem 11: 619, 2000; Pooga et al., FASEB J 12: 67, 1998, WO2008/022046, WO 2006/053683, WO 2004/048545, WO 2008/093982)—Transportin is approximately 27 amino acids in length and contains approximately 12 functional amino acids from the neuropeptide galanin and approximately 14 amino acids from the mast cell degranulating peptide mastoparan, a CPP in its own right. Typically these peptides are connected by a lysine. Transportan sequences include but are not limited to the following: GWTLNSAGYLLGKINLKALAALAKKIL (SEQ ID NO: 3666). The TP-10 sequence is the shortest of the transportan group, TP-7, TP-9 and TP-10 and is as follows: AGYLLGKINLKALAALAKKIL (SEQ ID NO: 3667).
(12) Protamine and Protamine-fragment/SV40 peptides—See Benimetskaya et al., Bioconjugate Chem 13: 177, 2002; U.S. Pat. No. 5,792,645, U.S. Pat. No. 7,329,638, and US 2005/0042753. Protamine-fragment/SV40 peptides are bifunctional CPPs composed of a C-terminal protamine-fragment that contains a DNA binding domain and an N-terminal nuclear localization signal derived from SV40 large T-antigen. One variant is called s-protamine-NLS and has sequences that include but are not limited to, R6WGR6-PKKKRKV (SEQ ID NO: 3668) while another, l-protamine-NLS, has sequences that include R4SR6FGR-6VWR4-PKKKRKV(SEQ ID NO: 3669). In addition to being combined with peptides from SV40, protamine itself has the capacity to promote uptake of NABTs into intracellular compartments.
(13) Polyethylenimine (PEI)—See the following references. (Intra and Salem, J Controlled Release 130: 129, 2008; Ogris et al., J Biol Chem 276: 47550, 2001; Breunig et al., J Gene Med 7: 1287, 2005; Loftus et al., Neurosci 139: 1061, 2006; Wang et al., Mol Therapy 3: 658, 2001; Boeckle et al., J Control Release 112: 240, 2006; U.S. Pat. No. 5,792,645, US 2003/0027784, US 2004/0185564, US 2008/0207553, WO 9602655, WO 00/59548, WO 2006/041617, WO 2004/029213, WO 03/099225, WO 2007/0135372, WO 94/01448)—PEI comes in linear and branched forms as well as in a low molecular weight form (<50,000 Daltons). It is a CPP-mimetic that has a particular advantage over other CPPs in that it is not subject to proteolysis. In addition to iv and im routes of administration, NABTs associated with a PEI containing carrier can be administered by aerosol delivery via the respiratory tract. Conjugation of PEI to certain melittin analogs provides added endosomolytic activity and, therefore, enhanced NABT delivery to intracellular sites where NABTs can carry out their intended function. PEI, as for most if not all CPPs, can be incorporated into nanoparticles to further promote the efficiency of NABT delivery to intracellular compartments. The specific methods for such CPP incorporation depend on the type of nanoparticle and are discussed in the reference documents provided herein for each type of nanoparticle. PEI can also be used to facilitate delivery of a NABT to the brain following intranasal administration. Also see Bhattacharya et al., Pharmaceut Res 25: 605, 2007; Zhang et al., J Gene Med 4: 183, 2002; Boado et al., Biotechnol Bioeng 96: 381, 2007; Coloma et al., Pharm Res 17: 266, 2000; US 2008/0051564, WO 94/13325, WO 99/00150, WO 2004/050016).
(14) Insulin and insulin-like growth factor receptor ligands—See Basu and Wickstrom, Bioconjugate Chem 8: 481, 1997; Zhang et al., J Gene Med 4: 183, 2002; Boado et al., Biotechnol Bioeng 96: 381, 2007; Coloma et al., Pharm Res 17: 266, 2000; Soos et al., Biochem J 235: 199, 1986; US 2008/0051564, WO 99/00150, WO 2004/050016 and U.S. Pat. No. 7,388,079)—Human Insulin receptor (HIR) monoclonal antibodies (MAbs) are directed to the human insulin receptor. Other suitable ligands include but are not limited to insulin, IGF-1 and IGF-2 or functional fragments thereof. Examples of IGF-1 binding peptides that can be used for this purpose include but are not limited to JB3 (D-C-S-K-A-P-K-L-P-A-A-Y-C (SEQ ID NO: 3670) where D denotes the D stereoisomer of C and where all the other stereoisomers are L) and JB9 (G-G-G-G-G-C-S-K-C; SEQ ID NO: 3671). Amide bond linked antisense oligos can be inserted between the first and second Gs of JB9. When incorporated into a carrier, these ligands can be used to deliver NABTs into cells that express this receptor. Such cells include but are not limited to liver, adipose tissue, skeletal muscle, cardiac muscle, brain, kidney and pancreas.

[0273] Insulin and insulin-like growth factor receptor ligands as described U.S. Pat. No. 4,801,575, WO 99/00150, WO 2004/050016, WO 2008/022349, WO 2005/035550, WO 2007/044323) are useful in methods targeting the CNS for delivery of NABTs specific for desired CNS targets. HIR monoclonal antibodies (HIR MAbs) are able to both cross the blood brain barrier as well as brain cell membranes. When conjugated to an NABT or incorporated into a carrier, such molecules facilitate transport of NABTs across the blood brain barrier. Other suitable ligands include IGF-1 and IGF-2 molecules and functional fragments thereof.

(15) Poly-Lysine—See Zhu et al., Biotechnol Appl Biochem 39: 179, 2004; Parker et al., J Gene Med 7: 1545, 2005; Stewart et al., Mol Pharm 50: 1487, 1996; U.S. Pat. No. 5,547,932, U.S. Pat. No. 5,792,645, WO 2006/053683, WO 2004/029213, and WO 93/04701. Poly-lysine consisting of approximately 3-20 amino acids can be used (D and L lysine stereoisomers both work) as carriers or as part of more complex carriers to transport NABTs into intracellular compartments where they can express their intended therapeutic effects. The CPP activity of poly-lysine can also be enhanced by glycosylation.
(16) Histidine-Lysine Peptides—See the following references. (Leng et al., Drug News Perspect 20: 77, 2007; U.S. Pat. No. 7,070,807, U.S. Pat. No. 7,163,695, US 2008/0171025, WO 01/47496, WO 2004/048421, WO 2006/060182)—Histidine-Lysine Peptides useful for the practice of the present invention come in both linear and branched forms. They may also be conjugated to polyethylene glycol and vascular specific ligands where they are particularly useful for delivering NABTs to the intracellular compartments of cells in solid tumors.
(17) Poly-Arginine—See Meade et al., Adv Drug Delivery Rev 59: 134, 2007; Meade and Dowdy Adv Drug Delivery Rev 60: 530, 2008; Jones et al., Br J Pharmacol 145: 1093, 2005; WO 2007/095152, WO 2008/008476, WO 2006/029078, WO 2006/0222657, WO 2006/053683, and WO 2004/029213. Poly-Arginine consisting of approximately 3-20 amino acids can be used (D and L lysine stereoisomers both work) as a fusion peptide with enhanced CPP activity where the fusion partner is selected from peptides derived from the following group: (a) HEF from influenza C virus; (b) HA2 and its analogs; (c) transmembrane glycoproteins from filovirus, rabies virus, vesicular stomatitis virus or Semliki Forest virus; (d) fusion polypeptide of sendai virus, human respiratory syncytial virus, measles virus, Newcastle disease virus, visna virus, murine leukemia virus, human T-cell leukemia virus, simian immunodeficiency virus; or (e) M2 protein of influenza A virus.
(18) NL4-10K—This molecule is described in Zeng et al., J Gene Med 6: 1247, 2004 and US 2005/0,048,606. —The NL4-10K peptide is based on nerve growth factor and has the sequence CTTTHTFVKALTMDGKQAAWRFIRIDTACKKKKKKKKKK (SEQ ID NO: 3672) and is typically used in a hairpin configuration. It facilitates uptake of NABTs into cells and tissues that express the nerve growth factor receptor TrkA. Alternative peptides based on nerve growth factor suitable for this purpose include, the following: TTATDIKGKEVMV (SEQ ID NO: 3673), EVNINNSVF(SEQ ID NO: 3674), RGIDSKHWNSY (SEQ ID NO: 3675) and TTTHTFVKALTMDGKQAAWRFIRIDTA (SEQ ID NO: 3676). Cells expressing TrkA include but are not limited to hepatocellular carcinoma, prostate cancer, neuroblastoma, melanoma, pancreatic cancer as well as non-malignant lung, pancreas, smooth muscle and prostate. NL4-10K peptides are suitable for getting NABTs across the blood brain barrier and into brain cells. US 2005/0048606 also provides CPPs suitable for promoting NABT uptake into cells that express the TrkB and TrkC receptors.
(19) S4₁₃-PV—See Mario et al., Biochem J 390: 603, 2005 and Mano et al., Biochimica Biophysica Acta 1758: 336, 2006. —S4₁₃-PV is a CPP that has a pronounced capacity to transport substances such as NABTs into cells without passing through endosomes. An exemplary sequence is ALWKTLLKKVLKAPKKKRKVC (SEQ ID NO: 3677).
(20) Sweet Arrow Peptide (SAP)—Foerg et al., Biochem 44: 72, 2005 described the SAP. —An exemplary SAP sequence is VRLPPPVRLPPPVRLPPP (SEQ ID NO: 3678).
(21) Human Calcitonin Derived Peptide hCT(9-32)—See Foerg et al., Biochem 44: 72, 2005. —hCT(9-32) has the following sequence LGTYTQDFNKFHTFPQTAIGVGAP, (SEQ ID NO: 3679).
(22) ARF based CPPs—See WO 2008/063113. —ARF based CPPs are 15-26 amino acids long comprising at least amino acids 1-14 of a mature mammalian ARF protein or a scrambled or partially inverted sequence thereof, optionally linked to one or more members of the group consisting of a cell-homing peptide, a receptor ligand, a linker and a peptide spacer comprising a selective protease cleavage site coupled to an inactivating peptide. A scrambled or partially inverted sequence of ARF defines a sequence wherein the same amino acids in the ARF sequence are included but one or several amino acids are in different positions so that part of the sequence is inverted or the whole sequence is scrambled. ARF sequences suitable for this use include but are not limited to human p14ARF and murine p19ARF. Suitable peptides for this use include but are not limited to M918 (MVTVLFRRLRIRRACGPPRVRV; (SEQ ID NO: 3680), M917 (MVRRFLVTLRIRRACGPPRVRV; (SEQ ID NO: 3681) and M872 (FVTRGCPRRLVARLIRVMVPRR; (SEQ ID NO: 3682).
(23) Kaposi FGF signal sequences—See Hudecz et al., Med Res Rev 25: 679, 2005; WO 2008/022046, and WO 2008/093982. —Kaposi FGF signal sequences include but are not limited to: AAVALLPAVLLALLAP (SEQ ID NO: 3683) and AAVLLPVLLPVLLAAP (SEQ ID NO: 3684).
(24) Human beta3 integrin signal sequence—See WO 2008/022046. —Human beta3 integrin signal sequences include: VTVLALGALAGVGVG, (SEQ ID NO: 3685).
(25) gp41 fusion sequence—See WO 2008/022046, and WO 2006/053683.)—gp41 fusion sequences include: GALFLGWLGAAGSTMGA (SEQ ID NO: 3686) which can be used as a CPP or combined with other CPPs to increase their endosomolytic function.
(26) Caiman crocodylus Ig(v) light chain—See the following references (Drin et al., AAPS PharmSci 4: 1, 2002; WO 2008/022046, WO 2006/053683, and WO 2004/048545. —Caiman crocodylus Ig(v) light chain sequences include: MGLGLHLLVLAAALQ (SEQ ID NO: 3687) and MGLGLHLLVLAAALQGAWSQPKKKRKV (SEQ ID NO: 3688) where the second sequence ends with a nuclear localization sequence from SV40 T antigen.
(27) hCT-derived peptide—See WO 2008/022046. —hCT-derived peptide sequences include: LGTYTQDFNKFHTFPQTAIGVGAP (SEQ ID NO: 3689).
(28) Loligomer—See WO 2008/022046. —An exemplary loligomer has the following sequence: TPPKKKRKVEDPKKKK (SEQ ID NO: 3690).
(29) Anthrax toxin derivatives—See the following references. (Arora and Leppla, J Biol Chem 268: 3334, 1993; Arora and Leppla, Infect Immun 62: 4955, 1994; Bradley et al., Nature 414: 225, 2001; Kushner et al., Proc Natl Acad Sci USA 100: 6652, 2003; Ballard et al., Proc Natl Acad Sci USA 93: 12531, 1996; Zhang et al., Proc Natl Acad Sci USA 101: 16756, 2004; Blanke et al., Proc Natl Acad Sci USA 93: 8437, 1996; Melnyk and Collier, Proc Natl Acad Sci USA 103: 9802, 2006; Krantz et al., Science 309: 777, 2005; Liu et al., Cell Microbiol 9: 977, 2007; U.S. Pat. No. 5,677,274, US 2003/0202989, US 2005/0220807, WO 97/23236, WO 03/087129, WO 2006/091233, and WO 94/18332)—Receptors for anthrax toxin are broadly found on the surfaces of various cell types. Anthrax toxin protective antigen (PA) is the portion of the anthrax toxin that is normally responsible for delivering the toxin to the cytoplasm of cells. PA functions both as a CPP and as an endosomolytic agent, is nontoxic, and can be used to promote the delivery of NABTs to the cytoplasm of cells. While PA is suitable, engineered peptides based on those regions of the PA domains directly involved in CPP and endosomolysis, along with certain other anthrax toxin sequences which augment these functions are most preferred. Anthrax lethal factor and fragments thereof also can be used to deliver NABTs into the cytoplasm of cells. Suitable engineered peptides based on anthrax sequences include, but are not limited to, ligation of a portion of the lethal factor sequence that contains the PA binding site with a sequence called the entry motif as provided by WO 2006/091233. Such engineered peptides can optionally be attached to a nuclear localization sequence. NABTs linked to polycationic tracts, e.g., polylysine, polyarginine and/or polyhistidine can further potentiate delivery of NABTs into the cytoplasm of cells.
(30) Ligands for transferrin receptor—See the following references. (U.S. Pat. No. 4,801,575, U.S. Pat. No. 5,547,932, U.S. Pat. No. 5,792,645, WO 2004/020404, WO 2004/020405, WO 2004/020454, WO 2004/020588, WO 2005/121179, WO 2006/049983, WO 2006/096515, WO 2008/033395, WO 2008/072075, WO 2008/022349, WO 2005/035550, WO 2007/044323 and WO 91/04753)—Ligands for transferrin receptor can be used to transport NABTs into cells which express this receptor. Such ligands include but are not limited to transferrin based peptides but can include other molecules such as peptides based on melanocortin, an integrin or glucagon-like peptide 1.

[0274] Ligands for the transferrin receptor can therefore be operably linked to the NABTs of the invention to facilitate transport of the therapeutic across the blood brain barrier in disorders where delivery to the CNS is desirable.

(31) Ligands for transmembrane domain protein 30A—See WO 2007/036021—Ligands for transmembrane domain protein 30A can be used to transport NABTs into cells that express this protein such as brain endothelium and can also be used to advantage to transport NABT across the blood brain barrier. Such ligands include antibodies and antibody fragments that bind the TMEM30A antigen as well as any one of several peptide ligands set forth in WO 2007/036021.
(32) Ligands for asialoglycoprotein receptor—See the following references. (Li et al., Sci China C Life Sci 42: 435, 1999; Huang et al., Int J Pharm 360: 197, 2008; Wang et al., J Drug Target 16: 233, 2008; Khorev et al., Bioorg Med Chem 16: 5216, 2008; WO 93/04701)—Ligands for asialoglycoprotein receptor can be used to transport NABTs into cells that express them, such as liver cells.
(33) Actively Transported Nutrients—See U.S. Pat. No. 6,528,631. —Actively transported nutrients can be directly conjugated to NABTs or associated with more complex carrier structures for the purpose of transporting said NABT into intracellular compartments. Exemplary nutrients for this purpose include, but are not limited to, folic acid, vitamin B6, vitamin B12, and cholesterol.
(34) UTARVE—See the following references. (Smith et al., International J Oncology 17: 841, 2000; WO 99/07723, WO 00/46384)—UTARVE refers to a vector for the delivery of NABTs into the cytoplasm of cells where the vector comprises a CPP or a ligand for a cell surface receptor that is internalized with the receptor and an influenza virus hemagglutinin peptide with endosomolytic activity. The CPP or cell surface receptor ligand can include any of those described herein. In addition, the ligand can be adenovirus penton peptide, epidermal growth factor receptor or the GM1 ganglioside receptor for cholera toxin B subunit. In addition, the vector may also include a polylysylleucyl peptide to provide additional NABT attachment sites and/or a nuclear localization signal. Adenovirus penton base proteins contain a receptor binding site motif (RGD) for attachment to integrins. Integrins are ubiquitous cell receptors. As used herein adenovirus penton base protein refers to the entire adenovirus penton base protein or to fragments thereof that include at least amino acids 1-354 that contain the receptor binding motif. The particular adenovirus from which the adenovirus penton base protein is derived is not critical and examples of such adenoviruses include but are not limited to Ad2, Ad3 and Ad5. These sequences are well known in the art. The influenza hemaglutinin peptide with endosomolytic activity is described elsewhere herein. The polylysylleucyl peptide has the sequence (KL)m where the lysine residues interact with the NABT while the leucine residues decrease the potential steric hindrance resulting from adjacent lysine residues. The value of m is not critical but generally represents from 1 to 300 alternating residues and preferably from 3 to 100. Should nuclear localization be desirable, a nuclear localization sequence, such as those discussed above, or otherwise well known in the art, may be employed.
(35) Antimicrobial peptides and their analogs—See the following references. (Sandgren et al., J Biol Chem 279: 17951, 2004; US 2004/0132970; US 2002/0082195, US 2004/0072990, US 2006/0069022, US 2007/0037744, US 2007/0065908, US 2007/0149448, US 2006/0128614, WO 2005/040201, WO 2006/011792, WO 2006/067402, WO 2006/076742, WO 2007/076162, WO 2007/148078, WO 2008/022444, WO 2006/050611, WO 2008/0125359)—Numerous antimicrobial peptides are naturally occurring and are involved in innate immunity. These peptides are typically cationic and function as CPPs and therefore can be harnessed to assist in the delivery of NABTs. The receptors for antimicrobial peptides are the cell surface proteoglycans, a major source of cell surface polyanions. While they are cytotoxic to microbes, antimicrobial peptides typically are much less toxic to mammalian cells. One such peptide is LL-37 which has the following sequence: LLGDFFRKSKEKIGKEFKRIVQRIKDFLRNLVPRTES (SEQ ID NO: 3691). Other examples involve peptides based on the dermaseptin family of antimicrobial peptides found on the skin of frogs of the Phylloinedusinae genus. Such peptides include, for example: ALWKTLLKKVLKA (SEQ ID NO: 3692), ALWKTLLKKVLKAPKKKRKV, (SEQ ID NO: 3693), PKKKRKVALWKTLLKKVLKA, (SEQ ID NO: 3694) and RQARRNRRRALWKTLLKKVLKA, (SEQ ID NO: 3695). Other suitable antimicrobial peptides or their analogs with CPP activity include but are not limited to novispirins, MUC7-12, CRAMP, PR-39, cryptdin-4, HBD-2, dermcidin, cecropin P1, maganin-2, granulysin and FALL-39. Such antimicrobial peptides are being developed as antimicrobial agents but also can be employed to enhance NABT delivery into cells. Analogs of antimicrobial peptides include but are not limited to those with D amino acid substitutions for their L stereoisomer counterparts for the purpose of reducing protease attack.
(36) Screened products of peptide and MAb fragment display libraries—See the following references. (Thomas et al., Pharmaceutical Res 24: 1564, 2007; WO 01/15511, WO 03/068942, WO 2007/143711, WO 97/17613, WO 97/17614)—A series of CPPs and MAb fragments with the capacity to transport NABTs into a broad range of cell types in a manner that promotes their biological activity have been identified through a series of screening steps starting with peptide or MAb fragment libraries. Indeed, a series of antibody single chain variable fragments (scFvs) with the capacity to bind to endothelial cells have been developed. Such scFvs can be used to advantage to facilitate transport NABTs into the endothelium. It is clear from such work that a wide range of effective CPP for the purposes of the present invention are readily available. A series of scFvs with the capacity to bind to endothelial cells and to cause the transport NABTs across the blood brain barrier have been developed and are described in the references provided.
(37) Designer CPPs—See the following references. (Rhee and Davis J Biol Chem 281: 1233, 2006; Kim et al., Exp Cell Res 312: 1277, 2006; Kaihatsu et al., Biochem 43: 14340, 2004; Hudecz et al., Med Res Rev 25: 679, 2005; Adenot et al., Chemotherapy 53: 73, 2007; U.S. Pat. No. 5,547,932, U.S. Pat. No. 7,329,638, U.S. Pat. No. 7,101,844, U.S. Pat. No. 6,200,801, U.S. Pat. No. 5,972,901, US 2005/0154188, US 2006/0228407, US 2004/0152653, US 2005/0042753, US 2003/0119725, US 2005/0239687, US 2005/0106598, US 2007/0129305, U.S. Pat. No. 6,841,535, US 2008/0182973, US 2009/0029387, WO 2007/069090, WO 00/34308, WO 00/62067, WO 2007/095152, WO 2007/056153, WO 2008/022046, US 2008/0234183, WO 2005/007854, WO 2007/053512, WO 2008/093982, WO 03/106491, WO 2004/016274, WO 03/097671, WO 01/08708, WO 97/46100, WO 06126865)—A large number of CPPs have been rationally designed based on the following: (i) a substantial number of potent CPPs have been identified beginning with those of natural origin; and (ii) effective CPPs typically can function as a prototype for other CPPs that share a set of similar properties related to amino acid composition, sequence patters and size. Such CPPs have subsequently been screened for activity and particularly active CPPs identified and tested in various carrier arrangements of the types provided herein. In addition, Hallbrink et al., have studied a broad range of CPPs and have developed comprehensive rules that describe CPP structure and function. They then applied these rules to generate a large number of Designer CPPs as described in US 2008/0234183 which claims priority to WO 03/106491. Design features that can be individually or in some instances in combination with one or more other such features can be used to generate designer CPPs are provided below:
(a) The design parameters disclosed in US 2008/0234183 include a bulk property value Z_{Σ}, a term called Bulkₕₐ that reflects the number of non-hydrogen atoms (e.g. C, N, S and O) in the side chains of the amino acids and a term hdb standing for the number of accepting hydrogen bonds for the side chains of the amino acids. Some examples of these Designer CPPs include the peptide sequenced IVIAKLKA (SEQ ID NO: 3696) and IVIAKLKANLMCKTCRLAK (SEQ ID NO: 3697);
(b) Those that include the peptide sequence KVKKQ (SEQ ID NO:3698);
(c) Those that include the D-amino acid peptide sequence D(AAKK)₄ (SEQ ID NO: 3699);
(d) Those that include the sequence PFVYLI (SEQ ID NO: 3700) including but not limited to the sequence CSIPPEVKFNKPFVYLI (SEQ ID NO: 3701) that has been termed the C105Y peptide;
(e) polycations consisting of various combinations of amines, substituted amines, guanidinium, substituted guanidinium, histidyl or substituted histidyl and organized into one of 60 different patters where a specific patterns repeats one to about 20 times (WO 2005/007854). These polycations can be directly attached to an NABT, attached to an NABT through a linker or indirectly associated through pRNA, nanoparticles, nanoparticles based on dendrimers, nanolattices, nanovesicles or micelles;
(f) An arginine-rich peptide of 8-16 subunits selected from X subunits, Y subunits and optional Z subunits including at least six X subunits, at least two Y subunits and at most three Z subunits where >50% of said subunits are X subunits and where (i) each X subunit independently represents arginine or an arginine analog said analog being a cationic alpha-amino acid comprising a side chain of the structure R¹N═C(NH₂)R² where R¹ is H or R; R² is R NH₂, NHR or NR₂ where R is lower alkyl or lower alkenyl and may further include oxygen or nitrogen; R¹ and R² may together from a ring; and the side chain is linked to said amino acid via R¹ or R²; (ii) each Y subunit independently represents a neutral amino acid —C(O)—(CHR)n-NH— where either n is 2 to 7 and each R is independently H or methyl or n is 1 and R is a neutral side chain selected from substituted or unsubstituted alkyl, alkenyl, alkynyl, aryl and aralkyl wherein said neutral side chain selected from substituted alkyl, alkenyl and alkynyl, includes at most one heteroatom for every four carbon atoms; and (iii) each Z subunit independently represents an amino acid selected from alanine, asparagine, cysteine, glutamine, glycine, histidine, lysine, methionine, serine and threonine.
(g) Sequences with the one of the following patterns were the term Xaa denotes either any amino acid or a position where an amino acid is not necessary with the noted preferred exceptions: XaaXaaXaaKKRRXaaXaaXaaXaaXaaXaaTWXaaETWWXaaXaaXaa (SEQ ID NO: 3702) (preferably at least one of the positions eight through thirteen is P, Q or G), YGFKKRRXaaXaaQXaaXaaXaaTWXaaETWWTE (SEQ ID NO: 3703) (preferably Xaa of position 16 is not omitted and preferably is an aromatic hydrophobic amino acid and is most preferably W) and YGFKKXRRPWTWWETWWTEX (SEQ ID NO: 3704) (preferably Xaa in position six is a hydrophobic amino acid, more preferably an aromatic hydrophobic amino acid and that the Xaa in position twenty is preferably omitted.
(h) A CPP comprising an amino acid sequence according to the general formula (X₁X₂B₁B₂X₃B₃X₄)n (SEQ ID NO: 3800) wherein X₁-X₄ are independently any hydrophobic amino acid; where in B₁, B₂ and B₃ are independently any basic amino acid; and wherein n is between 1 and 10.
(i) A CPP comprising an amino acid sequence according to either the general formula Q₁-X¹-(X²)₂-(X³)₂-X²-X⁴-X³-X⁴-X²-X⁴-X³-(X²)₂-Q₂ (SEQ ID NO: 3705) or Q₁-(X²)₂-X³-X⁴-X²-X⁴-X³-X⁴-X²-(X³)₂-(X²)₂-X¹-Q₂ (SEQ ID NO: 3706) where in one of Q₁ and Q₂ is H and the other of Q₁ and Q₂ is a covalent attachment to a linking moiety further attached to an NABT or to a carrier complex associated with an NABT; each X¹ is, independently, a naturally occurring or non-naturally occurring amino acid; each X², is independently, a D or L amino acid selected from lysine, histidine, homolysine, diaminobutyric acid, arginine, ornithine or homoarginine; each X³ is, independently, a D or L amino acid selected from alanine, valine, leucine, isoleucine, phenylalanine, tyrosine, tryptophan, cysteine, or methionine; and each X⁴ is, independently, a D or L amino acid selected from lysine, histidine, homolysine, diaminobutyric acid, arginine, ornithine, homoarginine, alanine, valine, leucine, isoleucine, phenylalanine, tyrosine, tryptophan, cysteine, methionine, glycine, serine, threonine, aspartate, glutamate, asparagine or glutamine.
(j) Those based on Syn B family peptides and generated using a computational model of cellular uptake followed by demonstrated ability to transport large charge molecules into intracellular compartments.
(k) CPPs have been designed that preferentially deliver NABTs to the cytoplasm of cells rather than to the nucleus. The CPP sequences useful for this purpose include but are not limited to the following sequence A-X₁-X₂-B-X₃-X₄-X₅-X₆-X₇-X₈ (SEQ ID NO: 3801) wherein A is an amino acid exhibiting relatively high freedom at the Φ and ω rotations of a peptide unit such as G or A, B is a basic amino acid and at least 3 residues of X₁-X₂-B-X₃-X₄-X₅-X₆-X₇-X₈ are R or K. CPP sequences useful for this purpose also include but are not limited to the following related sequences: YGRRARRRARR (SEQ ID NO: 3707), YGRRARRRARR (SEQ ID NO: 3708) and YGRRRRRRRRR (SEQ ID NO: 3709).

[0275] For example, designer ligands and CPPs have been described in the following references. See Costantino et al., J Controlled Release 108: 84, (2005), WO 2006/061101; WO 2007/143711 and WO 2005/035550. Exemplary ligands include those with one of the following sequences: HAIYPRH (SEQ ID NO: 3710) or THRPPMWSPVWP (SEQ ID NO: 3711). A designer CPP with the sequence H₂N-G-F-D-T-G-F-L-S-CONH₂ (SEQ ID NO: 3712), where D denotes the D stereoisomer of T and where all the other stereoisomers are L, that can be incorporated into nanoparticles suitable for transporting NABTs across the blood brain barrier. A designer CPP with the sequence H₂N-GF (specifically Phe-D) TGFLS-CONH₂ (SEQ ID NO: 3713) is well suited to carry NABTs into the cytoplasm of endothelial cells.

(38) Designer polycations that are not peptides—See U.S. Pat. No. 6,583,301; WO 99/02191. Designer polycations that are not peptides have been produced and shown to transport large charged molecules into intracellular compartments. These include but are not limited to structures that contain bipolar lipids with cationic heads, a hydrophobic backbone and a hydrophilic tail with a detailed structure as described in U.S. Pat. No. 6,583,301.
(39) Rabies virus glycoprotein (RVG) peptide—(U.S. Pat. No. 7,329,638, US 2005/0042753, WO 2008/054544)—The RVG peptide has sequences that include but are not limited to YTIWMPENPRPGTPCDIFTNSRGKRASNG (SEQ ID NO: 3714). When this peptide or a derivative or variant of it is used in a carrier for an NABT, it facilitates transport of the carrier/NABT complex across the blood brain barrier and into brain cells. In some embodiments the RVG peptide functions as a targeting agent and is conjugated to a carrier particle and an agent termed an effector agent (as defined by WO 2008/054544) that is associated with the carrier particle. In one embodiment said effector agent is a NABT. RVG may be used as the sole targeting agent or be used in combination with other targeting agents that include but are not limited to insulin, transferrin, insulin like growth factor, leptin, low density lipoprotein and fragments or peptidomimetics thereof. In some embodiments, the carrier particle is a lysosomal or polymeric nanoparticle, for example a liposome, polyarginine, protamine or a cyclodextrin-based nanoparticle. In alternative embodiments, the carrier particle is a CPP such as 11dR, 9dR, 7dR, 5dR or TAT or fragments thereof. 11dR, 9dR, 7dR and 5dR are polymeric arginine residues of varying length in these cases 11, 9, 7 and 5 arginines respectively.
(40) Ligands for leptin receptor—(WO 2008/022349, WO 2005/035550, WO 2007/044323)—Ligands for leptin receptor can be used to transport NABTs across the blood brain barrier.
(41) Ligands for lipoprotein receptor—(U.S. Pat. No. 5,547,932, WO 2008/022349, WO 2007/044323)—Ligands for lipoprotein receptor can be used to transport NABTs across the blood brain barrier.
(42) Hemagglutinating virus of Japan (HVJ) envelope. See the following references. Zhang et al., Biochem Biophys Res Commun 373: 345, 2008; Yamada et al., Am J Physiol 271: R1212, 1996; Bai et al., Ann Thorac Surg 66: 814, 1998; Ogata et al., Curr Eye Res 18: 261, 1999; Matsuo et al., J Drug Target 8: 207, 2000; Tomita et al., J Gene Med 4: 527, 2002; Okano et al., Gene Ther 10: 1381, 2003; Parveen et al., Virology 314: 74, 2003; Ferrari et al., Gene Ther 11: 1659, 2004; Sasaki et al., Gene Ther 12: 203, 2005; Griesenbach et al., Biomaterials 29: 1533, 2008; Kaneda et al., Mol Ther 6: 219, 2002; Kaneda et al., Expert Opin Drug Deliv 5: 221, 2008; Mima et al., J Gene Med 7: 888, 2005; Shimbo et al., Biochem Biophys Res Commun 364: 423, 2007; Kaneda et al., Adv Genet. 53: 307, 2005; Shimamura et al., Biochem Biophys Res Commun 300: 464, 2003; Morishita et al., Biochem. Biophys Res Commun 334: 1121, 2005; Kotani et al., Curr Gene Ther 4: 183, 2004; Hagihara et al., Gene Ther 7: 759, 2000; Ohmori et al., Eur J Cardio-thoracic Surg 27: 768, 2005; Tsujie et al., Kidney Inter 59: 1390, 2001; Yonemitsu et al., Gene Ther 4: 631, 1997; U.S. Pat. No. 6,913,923, US 2003/0013195, US 2004/0219674, US 2005/0239188, US 2006/0002894, WO 95/30330. Tissues where improved NABT uptake can be achieved by HVJ containing delivery systems include but are not limited to CNS, cardiovascular, uterus, liver, spleen, periodontal, skin, lung, retina, kidney, lymphoid tissues, embryonic stem cells and various solid tumors. In addition, carriers based on the HVJ envelope can be used to transfer NABTs across the blood brain barrier. Delivery has been via numerous routes including but not limited to topical, iv, intranasal, direct tissue injections including injection into amniotic fluid. This delivery system is particularly versatile and optionally includes nanoparticles and liposomes.
(43) Heart homing peptides are described in WO 00/75174 and include: GGGVFWQ (SEQ ID NO: 3715), HGRVRPH (SEQ ID NO: 3716), VVLVTSS (SEQ ID NO: 3717), CLHRGNSC (SEQ ID NO: 3718) and CRSWNKADNRSC (SEQ ID NO: 3719). These peptides can be directly conjugated to NABTs or be incorporated into more complex carriers. Further, they can be conjugated to or indirectly associated with other CPPs provided herein. The CRSWNKADNRSC (SEQ ID NO: 3719) peptide is particularly well suited to targeting regions of ischemia-reperfusion injury in the heart such as occurs in the treatment of heart attacks when the blood supply is medically restored.
(44) Peptides that target the LOX-1 receptor as described in White et al., Hypertension 37: 449, 2001) are particularly suitable for targeting NABTs to the endothelium. These peptides were initially selected from peptide libraries and then further screened for CPP activity. Examples include but are not limited to the following peptides: LSIPPKA (SEQ ID NO: 3720), FQTPPQL (SEQ ID NO: 3721) and LTPATAI (SEQ ID NO: 3722). LOX-1 is up-regulated on dysfunctional endothelial cells such as those involved in hypertension, diabetes, inflammation, restenosis, septic shock, ischemia-reperfusion injury and atherosclerosis and thus such peptides are particularly well suited for concentrating NABTs into this subset of cells to treat these and related medical conditions;
(45) Peptide for ocular delivery (POD) is described in Johnson et al., Mol Ther 16: 107, 2008)—POD has the following sequence GGG(ARKKAAKA)₄ (SEQ ID NO: 3723) and is suitable for transporting NABTs into the retina.
(46) LFA-1 targeting moieties are described in U.S. Pat. No. 7,329,638, US patent application 2005/0042753, International application WO 2007/127219. Preferred targeting moieties are selected from the group consisting of an antibody or a functional fragment thereof having immuno specificity for LFA-2 or protamine or a functional fragment thereof such as a peptide with the sequence RSQSRSRYYRQRQRSRRRRRRS (SEQ ID NO: 3724). Cells susceptible to LAF-1 targeting of NABTs include leukocytes and nerve cells as well as a variety of cancer cell types including but not limited to breast, colon and pancreas.
(47) PH-50—is described in WO 03/082213 and can be cross-linked and milled to generate nanoparticles to deliver NABTs to cells such as phagocytes involved in inflammation such as but not limited to those involved in ischemia reperfusion injury, arthritis and in atherosclerotic plaques.
(48) HA2 peptides are described in Dopheide et al., J Gen Virol 50: 329, 1980; Wang and El-Deiry, Trends Biotech 22: 431, 2004, Pichon et al., Antisense Nucleic Acid Drug Dev 7: 335, 1997; Daniels et al., Cell 40: 431, 1985; Navarro-Quiroga et al., Brain Res Mol Brain Res 105: 86, 2002; Cho et al., Biotechnol Appl Biochem 32: 21, 2000; Bailey et al., Biochim Biophys Acta 1324: 232, 1997; Steinhauer et al., J Virol 69: 6643, 1995; Sugita et al., Biochem Biophys Res Comm 363: 107, 2007; U.S. Pat. No. 5,547,932, WO 00/46384, WO 99/07723, and WO2008/022046. HA2 peptides can be employed in the compositions and methods of the invention to enhance endosomolysis to facilitate increased levels of NABT delivery. Influenza virus hemagglutinin (HA) is a trimer of identical subunits each of which contains two polypeptide chains HA1 and HA2. Functional HA2 sequences include but are not limited to: GLFGAIAGFIENGWEG (SEQ ID NO: 3725), GLFGAIAGFIGN(or G)GWGGMI(or V)D (SEQ ID NO: 3726) or GDIMGEWGNEIFGAIAGFLG (SEQ ID NO: 3727). In some instances, HA2 has been fused to the TAT CPP as described briefly above, to produce the dTAT-HA2 peptide. Such sequences include: RRRQRRKKRGGDIMGEWGNEIFGAIAGFLG (SEQ ID NO: 3728). dTAT-HA2 can more effectively deliver a bioactive NABT than TAT in instances where endosomal/lysosomal sequestration of the NABT reduces activity significantly.
(49) Poly-histidine and histidine requiring peptides See the following references. (Leng et al., Drug News Perspect 20: 77, 2007; McKenzie et al., Bioconjug Chem 11: 901, 2000; Reed et al., Nucleic Acids Res 33: e86, 2005; Lee et al., J Control Release 90: 363, 2003; Lo and Wang, Biomaterials 29: 2408, 2008, and WO 2006/053683)—Poly-histidine is hydrophobic at physiological pH but ionized at endosomal pH resulting in destabilization of the endosomal membrane. Polyhistidine can be operably linked to various CPPs to promote endosomolysis following cellular uptake. In some manifestations histidine is conjugated to poly(2-hydroxyethyl aspartamide) to produce an endosomolytic molecule capable of promoting the release of NABTs from endosomes, lysosomes or phagosomes. In another manifestation, approximately 10 histidines (preferred range 3 to 20 His) are conjugated to the C-terminus of TAT. In yet another embodiment, the aforementioned molecule comprises two cysteine residues which are incorporated into the molecule with a preferred distribution being cysteine-5 histidines-TAT-5 histidines-cysteine. Other histidine requiring peptides suitable for this purpose include but are not limited to the following: CHKKKKKKHC (SEQ ID NO: 3729), CHHHHHHKKKHHHHHHC (SEQ ID NO: 3730) and HHHHHWYG (SEQ ID NO: 3731).
(50) Sendi F1—(WO 2008/022046)—has the following sequence: FFGAVIGTIALGVATA (SEQ ID NO: 3732) which can be incorporated into fusion CPPs to increase their endosomolytic activity.
(51) Respiratory Syncytial Virus F1—(WO 2008/022046)—has the following sequence: FLGFLLGVGSAIASGV (SEQ ID NO: 3733) and can be incorporated into fusion CPPs to increase their endosomolytic activity.
(52) HIV gp41—(WO 2008/022046, WO 2006/053683)—has the following sequence: GVFVLGFLGFLATAGS (SEQ ID NO: 3734) can be incorporated into fusion CPPs to increase their endosomolytic activity.
(53) Ebola GP2—(WO 2008/022046)—has the following sequence: GAAIGLAWIPYFGPAA (SEQ ID NO: 3735) and can be incorporated into fusion CPPs to increase their endosomolytic activity.
(54) pH Triggered Agents See the following references (Ogris et al., J Biol Chem 276: 47550, 2001; Meyer et al., J Gene Med 9: 797, 2007; Chen et al., Bioconjug Chem 17: 1057, 2006; Boeckle et al., J Control Release 112: 240, 2006; Schreier, Pharm Acta Helv 68: 145, 1994; Martin and Rice, AAPS J 9: E18, 2007; Plank et al., Adv Drug Delivery Rev 34: 21, 1998; Wagner, Adv Drug Deliv Rev 38: 279, 1999; Eliyahu et al., Biomaterials 27: 1646, 2006; Eliyahu et al., Gene Therapy 12: 494, 2005; Provoda et al., J Biol Chem 278: 35102, 2003; Choi and Lee, J Controlled Release 131: 70, 2008; Parente et al., Biochem 29: 8720, 1990; Wyman et al., Biochem 36: 3008, 1997; Rittner et al., Mol Therapy 5: 104, 2002; US 2007/0036865, US 2004/0198687, US 2005/0244504, US 2003/0199090, US 2008/0187998, US 2006/0084617, U.S. Pat. No. 7,374,778, WO 2004/090107, WO 96/00792, WO 03/093449, WO 2006/053683, WO 94/01448)—pH Triggering Agents are agents that respond to the acidic pH found in endosomes/lysosomes or phagosomes in a manner that causes them to become endosomolytic. Such agents include certain viral proteins listed elsewhere herein but also include other peptides and small molecules that can be incorporated into a larger carrier molecule in multiple copies to concentrate their effect on endosomes/lysosomes (endosomolytic polymer). Endosomolytic polymers can be conjugated directly to NABTs by stable or by means of pH labile bonds or incorporated into nanoparticles carriers. Maleamates suitable for use as pH triggering agents include, but are not limited to, carboxydimethylmaleic anhydride, carboxydimethylmaleic anhydride-thioester and carboxydimethylmaleic anhydride-polyethylene glycol. In a preferred embodiment, a multiplicity of such maleamates (e.g., disubstituted maleic anhydride derivatives) are reversibly linked to polyamine as an endosomolytic polymer. Alternative pH triggering agents include but are not limited to the following:
(a) poly(beta-amino ester) as well as salts, derivatives, co-polymers and blends thereof;
(b) oligo sulfonamides including those with sulfamethizole, sulfadimethoxine, sulfadiazine or sulfamerazine moieties. Such oligo sulfonamides can be used without a separate endosomolytic polymer;
(c) Spermine where said spermine may include a cholesterol and/or fatty acid that may be bonded directly to a secondary amine in the spermine and said spermine may be further linked to a carbohydrate such as dextran or arabinogalactan;
(d) Peptides based on certain bacterial pore forming proteins such as listeriolysin O where the damage caused to cellular membranes around neutral pH is not unacceptably toxic. Listeriolysin O also can be beneficially combined with low molecular weight PEI to promote delivery of NABTs.
(e) Peptides and conjugates based on melittin (also called mellitin) of GIGAVLKVLTTGLPALISWIKRKRQQ (SEQ ID NO: 3736). Certain melittin analogues are better suited to this purpose than native melittin. Melittin-PEI conjugates are particularly preferred and are well suited as pH triggering agents. Exemplary conjugates include those where the N-terminus of melittin is conjugated to PEI. Further, modification of the C-terminally linked melittin peptide by replacement of the two neutral Q residues with E residues can increase the membrane lytic activity of melittin-PEI conjugates at endosomal pH. A preferred peptide structure with CPP and endosomolytic activity is a dimethylmaleic acid-melittin-polylysine conjugate. Melittin has also been developed into a gene delivery peptide capable of condensing and cross-linking DNA. This involves addition of lysine residues to increase the positive charge and terminal cysteine residues to promote polymerization.
(f) Alternative endosomolytic polymers include but are not limited to polyesters, polyanhydrides, polyethers, polyamides, polyacrylates, polymethacrylates, polycarbamates, polycarbonates, polyureas, poly(beta-amino esters) polythioesters and poly(alkyl)acrylic acids.
(g) The endosomolytic/pH triggering agents include but are not limited to peptides that contain imidazole groups or peptides having a repeating glutamate, alanine, leucine, alanine structure such as the EALA peptide (SEQ ID NO: 3737) (also known as GALA; SEQ ID NO: 3738) with a sequence that includes but is not limited to WEAALAEALAEALAEHLAEALAEALEALAA (SEQ ID NO: 3739) as well as the following: KALA (SEQ ID NO: 3740) with a sequence that includes but is not limited to WEAKLAKALAKALAKHLAKALAKALKACEA (SEQ ID NO: 3741), EGLA (SEQ ID NO: 3742), JTS-1 with a sequence that includes but is not limited to GLFEALLELLESLWELLLEA (SEQ ID NO: 3743), gramicidin S, ppTG1 with a sequence that includes but is not limited to GLFKALLKLLKSLWKLLLKA (SEQ ID NO: 3744) and ppTG20 with a sequence that includes but is not limited to GLFRALLRLLRSLWRLLLRA (SEQ ID NO: 3745).
(h) Any polymer which is not hydrophobic at physiologic pH but which becomes hydrophobic at pH (5.0-6.5) can be useful to promote endosomolysis and increase delivery of the NABT described herein. Further examples include: (a) Polymers that contain multiple carboxylic acid groups; and (b) Random, block and graft copolymers that include acrylate groups and alkyl substituted acrylate groups where preferably the alkyl group is a 1-6 carbon straight, branched or cyclic alkane. Preferred monomers for use in polymeric materials include poly(ethylacrylic acid), poly(propylacrylic acid) and poly(butylacrylic acid). Copolymers of these monomers by themselves or including acrylic acid can be used. Alternatively, or in addition, the carrier composition can include ligands such as poly-lysine or chitosan that can be associated with the NABT.

[0276] The ability of the molecules described above to move NABTs across cell membranes may be further enhanced by combining them with certain lipophilic domains and then combining the product with a NABT as described, for example, in Koppelhus et al., Bioconjugate Chem 19: 1526, 2008 and WO 2008/043366. Such lipophilic domains that may be conjugated to the CPP or to the NABT include but are not limited to the following: (1) an alkyl, alkenyl or alkynyl chain comprising 5-20 carbon atoms with a linear arrangement or including at least one cycloalkyl or heterocycle; or (2) a fatty acid containing 4 to 20 carbon atoms.

[0277] In certain embodiments of the invention, CPP, linkers, nanoparticles, nanoparticles based on dendrimers, nanolattices, nanovesicles, nanoribbons, liposomes or micelles used to associate such peptides to NABTs may be employed in the therapeutically beneficial compositions described herein. Such liposome applications include the use of heat delivery systems to promote targeting of heat labile liposomes carrying NABTs to particular tissues. Such compositions are described in Najlah and D'Emanuele, Curr Opin Pharmacol 6: 522, 2006; Munoz-Morris et al., Biochem Biophys Res Commun 355: 877, 2007; Lim et al., Angew Chem Int Ed 46: 3475, 2007; Zhu et al., Biotechnol Appl Biochem 39: 179, 2004; Huang et al., Bioconjug Chem 18: 403, 2007; Kolhatkar et al., Bioconjug Chem 18: 2054, 2007; Najlah et al., Bioconjug Chem 18: 937, 2007; Desgates et al., Adv Drug Delivery Rev 60: 537, 2008; Meade et al., Adv Drug Delivery Rev 59: 134, 2007; Albarran et al., Protein Engineering, Design & Selection 18: 147, 2005; Hashida et al., Br J Cancer 90: 1252, 2004; Ho et al., Cancer Res 61: 474, 2001; U.S. Pat. No. 7,329,638, US 2005/0042753, US 2006/0159619, US 2007/0077230, WO 2008/106503, WO 2008/073856, WO 2008/070141, WO 2008/045486, WO 2008/042686, WO 2008/003329, WO 2008/026224, WO 2008/037463, WO 2008/039188, WO2007/056153, WO2008/022046, WO 2007/131286, WO 2007/048019, WO 2004/048545, WO 2008/033253, WO 2005/035550, WO 0610247, and WO 2007/133182.

[0278] In certain embodiments, CPP are not employed to enhance uptake of the NABT of the invention. Compositions suitable for this embodiment are provided in the following references: Najlah and D'Emanuele, Curr Opin Pharmacol 6: 522, 2006; Huang et al., Bioconjug Chem 18: 403, 2007; Kolhatkar et al., Bioconjug Chem 18: 2054, 2007; Najlah et al., Bioconjug Chem 18: 937, 2007; US 2005/0175682, US 2007/0042031, U.S. Pat. No. 6,410,328, US 2005/0064595, US 2006/0083780, US 2006/0240093, US 2006/0051405, US 2007/0042031, US 2006/0240554, US 2008/0020058, US 2008/0188675, US 2006/0159619, WO 2008/096321, WO 2008/091465, WO 2008/073856, WO 2008/070141, WO 2008/045486, WO 2008/042686, WO 2008/003329, WO 2008/026224, WO 2008/037463, WO 2007/131286, WO 2007/048019, WO 2004/048545 WO 2007/0135372, WO 2008/033253, WO 2007/086881, WO 2007/086883, and WO 2007/133182.

[0279] In certain embodiments, it is preferable to deliver NABTs topically (e.g., to skin (e.g., for the treatment of psoriasis), mucus membranes, rectum, lungs and bladder). The following references describe compositions and methods that facilitate topical NABT delivery. See US 2005/0096287, US 2005/0238606, US 2008/0114281, U.S. Pat. No. 7,374,778, US 2007/0105775, WO 99/60167, WO 2005/069736, and WO 2004/076674. Exemplary methods and compositions include: (1) instruments that deliver a charge by means of electrodes to the skin with the result that the stratum corneum in an area beneath the electrodes is ablated thereby generating at least one micro-channel, the NABTs being administered optionally being associated with any of the NABT carriers described herein; (2) the use of ultrasound to both cross the skin and to assist in getting carrier/NABT complexes into cells; and (3) use of a carrier including but not limited to emulsions, colloids, surfactants, microscopic vesicles, a fatty acid, liposomes and transfersomes. The methods and compositions just provided in (2) and (3) and where the NABT has phosphodiester and/or phosphorothioate linkages may be further abetted by the use of reversible Charge Neutralization Groups of the type described in WO 2008/008476.

[0280] Polyampholyte complexes can be used to promote NABT uptake following topical application or following intravascular, intramuscular, intraperitoneal administration or by direct injections into particular tissues. In a preferred embodiment the polyampholyte complexes contain pH-labile bonds such as those described in US 2004/0162235, and WO 2004/076674.

[0281] Additional agents, CPPs and endosomolytic agents may be directly linked to NABTs or to carriers non-covalently associated with NABTs to improve the intracellular bioavailability of the NABT. Such agents include but are not limited to the compositions, methods and uses described in the following: Kubo et al., Org Biomol Chem 3: 3257, 2005; U.S. Pat. No. 5,574,142, U.S. Pat. No. 6,172,208, U.S. Pat. No. 6,900,297, US 2008/0152661, US 2003/0148928, WO 01/15737, WO 2008/022309, WO 2006/031461, WO 02/094185, WO 03/069306, WO 93/07883, WO 94/13325, WO 92/22332, WO 94/01448.

[0282] In order to cross intact mammalian skin, lipid vesicles must pass through a series of fine pores, each with a diameter less than 50 nm, under the influence of a suitable transdermal gradient. Therefore, it is desirable to use a liposome that is highly deformable and able to pass through such fine pores.

[0283] Liposomes obtained from natural phospholipids are biocompatible and biodegradable; liposomes can incorporate a wide range of water and lipid soluble drugs; liposomes can protect encapsulated drugs in their internal compartments from metabolism and degradation (Rosoff, in Pharmaceutical Dosage Forms, Lieberman, Rieger and Banker (Eds.), 1988, Marcel Dekker, Inc., New York, N.Y., volume 1, p. 245). Important considerations in the preparation of liposome formulations are the lipid surface charge, vesicle size and the aqueous volume of the liposomes.

[0284] Liposomes are useful for the transfer and delivery of active ingredients to the site of action. Because the liposomal membrane is structurally similar to biological membranes, when liposomes are applied to a tissue, the liposomes start to merge with the cellular membranes. As the merging of the liposome and cell progresses, the liposomal contents are emptied into the cell where the active agent may act.

[0285] Liposomal formulations have been the focus of extensive investigation as the mode of delivery for many drugs. There is growing evidence that for topical administration, liposomes present several advantages over some other formulations. Such advantages include reduced side-effects related to high systemic absorption of the administered drug, increased accumulation of the administered drug at the desired target, and the ability to administer a wide variety of drugs, both hydrophilic and hydrophobic, into the skin.

[0286] Several reports have detailed the ability of liposomes to deliver agents including high-molecular weight DNA into the skin. Compounds including analgesics, antibodies, hormones and high-molecular weight DNAs have been administered to the skin. The majority of applications resulted in the targeting of the upper epidermis.

[0287] Liposomes fall into two broad classes. Cationic liposomes are positively charged liposomes that interact with the negatively charged DNA molecules to form a stable complex. The positively charged DNA/liposome complex binds to the negatively charged cell surface and is internalized into an endosome. Due to the acidic pH within the endosome, the liposomes are ruptured, releasing their contents into the cell cytoplasm (Wang et al., Biochem Biophys Res Commun, 1987, 147, 980-985).

[0288] Liposomes which are pH-sensitive or negatively-charged, entrap DNA rather than complex with it. Since both the DNA and the lipid are similarly charged, repulsion rather than complex formation occurs. Nevertheless, some DNA is entrapped within the aqueous interior of these liposomes. pH-sensitive liposomes have been used to deliver DNA encoding the thymidine kinase gene to cell monolayers in culture. Expression of the exogenous gene was detected in the target cells (Zhou et al., J Controlled Release, 1992, 19, 269-274).

[0289] One major type of liposomal composition includes phospholipids other than naturally-derived phosphatidylcholine. Neutral liposome compositions, for example, can be formed from dimyristoyl phosphatidylcholine (DMPC) or dipalmitoyl phosphatidylcholine (DPPC). Anionic liposome compositions generally are formed from dimyristoyl phosphatidylglycerol, while anionic fusogenic liposomes are formed primarily from dioleoyl phosphatidylethanolamine (DOPE). Another type of liposomal composition is formed from phosphatidylcholine (PC) such as, for example, soybean PC, and egg PC. Another type is formed from mixtures of phospholipid and/or phosphatidylcholine and/or cholesterol.

[0290] Several studies have assessed the topical delivery of liposomal drug formulations to the skin. Application of liposomes containing interferon to guinea pig skin resulted in a reduction of skin herpes sores while delivery of interferon via other means (e.g., as a solution or as an emulsion) were ineffective (Weiner et al., Journal of Drug Targeting, 1992, 2, 405-410). Further, an additional study tested the efficacy of interferon administered as part of a liposomal formulation to the administration of interferon using an aqueous system, and concluded that the liposomal formulation was superior to aqueous administration (du Plessis et al., Antiviral Research, 1992, 18, 259-265).

[0291] Non-ionic liposomal systems have also been examined to determine their utility in the delivery of drugs to the skin, in particular systems comprising non-ionic surfactant and cholesterol. Non-ionic liposomal formulations comprising Novasome® I (glyceryl dilaurate/cholesterol/polyoxyethylene-10-stearyl ether) and Novasome® II (glyceryl distearate/cholesterol/polyoxyethylene-10-stearyl ether) were used to deliver cyclosporin-A into the dermis of mouse skin. Results indicated that such non-ionic liposomal systems were effective in facilitating the deposition of cyclosporin-A into different layers of the skin (Hu et al. S.T.P. Pharma. Scid., 1994, 4, 6, 466).

[0292] Liposomes also include “sterically stabilized” liposomes, a term which, as used herein, refers to liposomes comprising one or more specialized lipids that, when incorporated into liposomes, result in enhanced circulation lifetimes relative to liposomes lacking such specialized lipids. Examples of sterically stabilized liposomes are those in which part of the vesicle-forming lipid portion of the liposome (A) comprises one or more glycolipids, such as monosialoganglioside GM1, or (B) is derivatized with one or more hydrophilic polymers, such as a polyethylene glycol (PEG) moiety. While not wishing to be bound by any particular theory, it is thought in the art that, at least for sterically stabilized liposomes containing gangliosides, sphingomyelin, or PEG-derivatized lipids, the enhanced circulation half-life of these sterically stabilized liposomes derives from a reduced uptake into cells of the reticuloendothelial system (RES) (Allen et al., FEBS Letters, 1987, 223, 42; Wu et al., Cancer Research, 1993, 53, 3765). Various liposomes comprising one or more glycolipids are known in the art. Papahadjopoulos et al. (Ann. N.Y. Acad. Sci., 1987, 507, 64) reported the ability of monosialoganglioside GM1, galactocerebroside sulfate and phosphatidylinositol to improve blood half-lives of liposomes. These findings were expounded upon by Gabizon et al. (Proc. Natl. Acad. Sci. U.S.A., 1988, 85, 6949). U.S. Pat. No. 4,837,028 and WO 88/04924, both to Allen et al., who disclose liposomes comprising (1) sphingomyelin and (2) the ganglioside GM1 or a galactocerebroside sulfate ester. U.S. Pat. No. 5,543,152 (Webb et al.) discloses liposomes comprising sphingomyelin. Liposomes comprising 1,2-sn-dimyristoylphosphatidylcholine are disclosed in WO 97/13499 (Lim et al.).

[0293] Many liposomes comprising lipids derivatized with one or more hydrophilic polymers, and methods of preparation thereof, are known in the art. Sunamoto et al. (Bull. Chem. Soc. Jpn., 1980, 53, 2778) described liposomes comprising a nonionic detergent, 2C1215G, that contains a PEG moiety. Ilium et al. (FEBS Lett., 1984, 167, 79) noted that hydrophilic coating of polystyrene particles with polymeric glycols results in significantly enhanced blood half-lives. Synthetic phospholipids modified by the attachment of carboxylic groups of polyalkylene glycols (e.g., PEG) are described by Sears (U.S. Pat. Nos. 4,426,330 and 4,534,899). Klibanov et al. (FEBS Lett., 1990, 268, 235) described experiments demonstrating that liposomes comprising phosphatidylethanolamine (PE) derivatized with PEG or PEG stearate have significant increases in blood circulation half-lives. Blume et al. (Biochimica et Biophysica Acta, 1990, 1029, 91) extended such observations to other PEG-derivatized phospholipids, e.g., DSPE-PEG, formed from the combination of distearoylphosphatidylethanolamine (DSPE) and PEG. Liposomes having covalently bound PEG moieties on their external surface are described in European Patent No. EP 0 445 131 B1 and WO 90/04384. Liposome compositions containing 1-20 mole percent of PE derivatized with PEG, and methods of use thereof, are described by Woodle et al. (U.S. Pat. Nos. 5,013,556 and 5,356,633) and Martin et al. (U.S. Pat. No. 5,213,804 and European Patent No. EP 0 496 813 B1). Liposomes comprising a number of other lipid-polymer conjugates are disclosed in WO 91/05545 and U.S. Pat. No. 5,225,212 (both to Martin et al.) and in WO 94/20073 (Zalipsky et al.) Liposomes comprising PEG-modified ceramide lipids are described in WO 96/10391 (Choi et al.). U.S. Pat. No. 5,540,935 (Miyazaki et al.) and U.S. Pat. No. 5,556,948 (Tagawa et al.) describe PEG-containing liposomes that can be further derivatized with functional moieties on their surfaces.

[0294] A limited number of liposomes comprising nucleic acids are known in the art. WO 96/40062 to Thierry et al. discloses methods for encapsulating high molecular weight nucleic acids in liposomes. U.S. Pat. No. 5,264,221 to Tagawa et al. discloses protein-bonded liposomes and asserts that the contents of such liposomes may include an antisense RNA. U.S. Pat. No. 5,665,710 to Rahman et al. describes certain methods of encapsulating NABTs in liposomes. WO 97/04787 to Love et al. discloses liposomes comprising antisense NABTs targeted to the raf gene.

[0295] Transfersomes are yet another type of liposomes, and are highly deformable lipid aggregates which are attractive candidates for drug delivery vehicles. Transfersomes may be described as lipid droplets that are so highly deformable that they are easily able to penetrate through pores which are smaller than the droplet. Transfersomes are adaptable to the environment in which they are used, e.g., they are self-optimizing (adaptive to the shape of pores in the skin), self-repairing, frequently reach their targets without fragmenting, and often self-loading. To make transfersomes, it is possible to add surface edge-activators, usually surfactants, to a standard liposomal composition. Transfersomes have been used to deliver serum albumin to the skin. The transfersome-mediated delivery of serum albumin has been shown to be as effective as subcutaneous injection of a solution containing serum albumin.

[0296] Surfactants find wide application in formulations such as emulsions (including microemulsions) and liposomes. The most common way of classifying and ranking the properties of the many different types of surfactants, both natural and synthetic, is by the use of the hydrophile/lipophile balance (HLB). The nature of the hydrophilic group (also known as the “head”) provides the most useful means for categorizing the different surfactants used in formulations (Rieger, in Pharmaceutical Dosage Forms, Marcel Dekker, Inc., New York, N.Y., 1988, p. 285).

[0297] If the surfactant molecule is not ionized, it is classified as a nonionic surfactant. Nonionic surfactants find wide application in pharmaceutical products and are usable over a wide range of pH values. In general their HLB values range from 2 to about 18 depending on their structure. Nonionic surfactants include nonionic esters such as ethylene glycol esters, propylene glycol esters, glyceryl esters, polyglyceryl esters, sorbitan esters, sucrose esters, and ethoxylated esters. Nonionic alkanolamides and ethers such as fatty alcohol ethoxylates, propoxylated alcohols, and ethoxylated/propoxylated block polymers are also included in this class. The polyoxyethylene surfactants are the most popular members of the nonionic surfactant class.

[0298] If the surfactant molecule carries a negative charge when it is dissolved or dispersed in water, the surfactant is classified as anionic. Anionic surfactants include carboxylates such as soaps, acyl lactylates, acyl amides of amino acids, esters of sulfuric acid such as alkyl sulfates and ethoxylated alkyl sulfates, sulfonates such as alkyl benzene sulfonates, acyl isethionates, acyl taurates and sulfosuccinates, and phosphates. The most important members of the anionic surfactant class are the alkyl sulfates and the soaps.

[0299] If the surfactant molecule carries a positive charge when it is dissolved or dispersed in water, the surfactant is classified as cationic. Cationic surfactants include quaternary ammonium salts and ethoxylated amines. The quaternary ammonium salts are the most used members of this class.

[0300] If the surfactant molecule has the ability to carry either a positive or negative charge, the surfactant is classified as amphoteric. Amphoteric surfactants include acrylic acid derivatives, substituted alkylamides, N-alkylbetaines and phosphatides.

[0301] The use of surfactants in drug products, formulations and in emulsions has been reviewed (Rieger, in Pharmaceutical Dosage Forms, Marcel Dekker, Inc., New York, N.Y., 1988, p. 285).

[0302] The pharmacology of conventional antisense oligos with a variety of backbone chemistries and without the use of carriers has been extensively studied in many species, including humans. The backbones include the following: phosphorothioate, phosphorothioate gapmers with 2′-0-methyl ends, morpholino, LNA and FANA. The pharmacokinetics of these compounds is similar and these agents behave in a similar manner to many other drugs that are used systemically. As a result, the basic pharmacologic principals that have been established over the years apply here as well. For example, see the standard textbooks: “Principles of Drug Action: the Basis of Pharmacology”, WB Pratt and P Taylor, (editors), 3^{rd} edition, 1990, Churchill Livingston, 1990; Principles of Pharmacology: The Pathophysiologic Basis of Drug Therapy, D E Golan, AH Tashjian, EJ Armstrong and AW Armstrong (editors) 2^{nd} edition, 2007, Lippincott Williams & Wilkins. References that summarize much of pharmacology of all types of NABTs includes but are not limited to the following: Encyclopedia of Pharmaceutical Technology,-6 Volume Set, J Swarbrick (Editor) 3rd edition, 2006, Informa HealthCare; Pharmaceutical Perspectives of Nucleic Acid-Based Therapy, R I Mahato and SW Kim (Editors) 1 edition, 2002, CRC press; Antisense Drug Technology: Principles, Strategies, and Applications, ST Crooke (Editor) 2nd edition, 2007, Pharmaceutical Aspects of Oligonucleotides, P Couvreur and C Malvy (Editors) 1st edition, 1999, CRC press; Therapeutic Oligonucleotides (RSC Biomolecular Sciences) (RSC Biomolecular Sciences) (Hardcover) by Jens Kurreck (Editor) Royal Society of Chemistry; 1 edition, 2008, CRC press; Clinical Trials of Genetic Therapy with Antisense DNA and DNA Vectors, E Wickstrom (Editor) 1st edition, 1998, CRC press.

[0303] For the purposes of this invention, conventional antisense oligos can be administered intravenously (i.v.), intraperitoneally (i.p.), subcutaneously (s.c.), topically, or intramuscularly (i.m.). Antisense NABTs can be delivered intrathecally or used in combination with agents that interrupt or permeate the blood-brain barrier in order to treat conditions involving the central nervous system.

[0304] In certain embodiments, (e.g., for the treatment of lung disorders, such as pulmonary fibrosis or asthma or to allow for self administration) it may desirable to deliver the NABT described herein in aerolsolized form. A pharmaceutical composition comprising at least one NABT can be administered as an aerosol formulation which contains the inhibitor in dissolved, suspended or emulsified form in a propellant or a mixture of solvent and propellant. The aerosolized formulation is then administered through the respiratory system or nasal passages.

[0305] An aerosol formulation used for nasal administration is generally an aqueous solution designed to be administered to the nasal passages in drops or sprays. Nasal solutions are generally prepared to be similar to nasal secretions and are generally isotonic and slightly buffered to maintain a pH of about 5.5 to about 6.5, although pH values outside of this range can additionally be used. Antimicrobial agents or preservatives can also be included in the formulation.

[0306] An aerosol formulation used for inhalations and inhalants is designed so that the NABT is carried into the respiratory tree of the patient administered by the nasal or oral respiratory route. See (WO 01/82868; WO 01/82873; WO 01/82980; WO 02/05730; WO 02/05785. Inhalation solutions can be administered, for example, by a nebulizer. Inhalations or insufflations, comprising finely powdered or liquid drugs, are delivered to the respiratory system as a pharmaceutical aerosol of a solution or suspension of the drug in a propellant.

[0307] An aerosol formulation generally contains a propellant to aid in disbursement of the NABT. Propellants can be liquefied gases, including halocarbons, for example, fluorocarbons such as fluorinated chlorinated hydrocarbons, hydrochlorofluorocarbons, and hydrochlorocarbons as well as hydrocarbons and hydrocarbon ethers (Remington's Pharmaceutical Sciences 18th ed., Gennaro, A. R., ed., Mack Publishing Company, Easton, Pa. (1990)).

[0308] Halocarbon propellants useful in the invention include fluorocarbon propellants in which all hydrogens are replaced with fluorine, hydrogen-containing fluorocarbon propellants, and hydrogen-containing chlorofluorocarbon propellants. Halocarbon propellants are described in Johnson, U.S. Pat. No. 5,376,359, and Purewal et al., U.S. Pat. No. 5,776,434.

[0309] Hydrocarbon propellants useful in the invention include, for example, propane, isobutane, n-butane, pentane, isopentane and neopentane. A blend of hydrocarbons can also be used as a propellant. Ether propellants include, for example, dimethyl ether as well as numerous other ethers.

[0310] The NABT can also be dispensed with a compressed gas. The compressed gas is generally an inert gas such as carbon dioxide, nitrous oxide or nitrogen.

[0311] An aerosol formulation of the invention can also contain more than one propellant. For example, the aerosol formulation can contain more than one propellant from the same class such as two or more fluorocarbons. An aerosol formulation can also contain more than one propellant from different classes. An aerosol formulation can contain any combination of two or more propellants from different classes, for example, a fluorohydrocarbon and a hydrocarbon.

[0312] Effective aerosol formulations can also include other components, for example, ethanol, isopropanol, propylene glycol, as well as surfactants or other components such as oils and detergents (Remington's Pharmaceutical Sciences, 1990; Purewal et al., U.S. Pat. No. 5,776,434). These aerosol components can serve to stabilize the formulation and lubricate valve components.

[0313] The aerosol formulation can be packaged under pressure and can be formulated as an aerosol using solutions, suspensions, emulsions, powders and semisolid preparations. A solution aerosol consists of a solution of an active ingredient such as a NABT in pure propellant or as a mixture of propellant and solvent. The solvent is used to dissolve the active ingredient and/or retard the evaporation of the propellant. Solvents useful in the invention include, for example, water, ethanol and glycols. A solution aerosol contains the active ingredient peptide and a propellant and can include any combination of solvents and preservatives or antioxidants.

[0314] An aerosol formulation can also be a dispersion or suspension. A suspension aerosol formulation will generally contain a suspension of an effective amount of the NABT and a dispersing agent. Dispersing agents useful in the invention include, for example, sorbitan trioleate, oleyl alcohol, oleic acid, lecithin and corn oil. A suspension aerosol formulation can also include lubricants and other aerosol components.

[0315] An aerosol formulation can similarly be formulated as an emulsion. An emulsion can include, for example, an alcohol such as ethanol, a surfactant, water and propellant, as well as the active ingredient, the NABT. The surfactant can be nonionic, anionic or cationic. One example of an emulsion can include, for example, ethanol, surfactant, water and propellant. Another example of an emulsion can include, for example, vegetable oil, glyceryl monostearate and propane.

[0316] As for many drugs, dose schedules for treating patients with NABTs can be readily extrapolated from animal studies. The extracellular concentrations that must be generally achieved with highly active conventional antisense oligos is in the 10-100 nanomolar (nM) range. Higher levels, up to 1.5 micromolar, may be more appropriate for some applications as this can result in an increase in the speed and amount of e oligo into the tissue thereby increasing tissue residence times. These levels can readily be achieved in the plasma. In the case of conventional antisense oligos, 1-10 mg/kg/day is a range that will cover most systemic applications with an infusion rate in the range of 0.1-1.5 mg/kg/hr. Intravenous administrations can be continuous or be over a period of minutes depending on the particular oligo. The primary determinants of the duration of treatment are the following: (1) the half-life of the target; (2) the richness of the blood supply to the target organ(s); and (3) the nature of the medical objective.

[0317] For ex vivo applications, the concentration of the conventional antisense oligos to be used is readily calculated based on the volume of physiologic balanced-salt solution or other medium in which the tissue to be treated is being bathed. In the large majority of applications, the oligos can be assumed to be stable for the duration of the treatment. With fresh tissue, 10-1000 nM represents the concentration extremes needed for a conventional antisense oligo with a reasonably good to excellent activity. Two hundred nanomolar (200 nM) is a generally serviceable level for most applications. Incubation of the tissue with the NABT at 5% rather than atmospheric (ambient) oxygen levels may improve the results significantly.

[0318] The following examples are provided to illustrate certain embodiments of the invention. They are not intended to limit the invention in any way.

### Example 1

### NABTs with Cardiovascular Applications and Methods of Use Thereof for the Treatment of Cardiovascular Disease

### A. Treatment of Cardiac Hypertrophy, MI, and Heart Failure.

[0319] Cardiovascular disease in the United States is associated with increasing morbity and mortality and thus new therapeutic agents for the treatment of this disorder are highly desirable. Such diseases include atherosclerosis, atherosclerotic plaque rupture, aneurisms (and ruptures thereof), coronary artery disease, cardiac hypertrophy, restenosis, vascular calcification, vascular proliferative disease, myocardial infarction and related pathologies which include, apoptosis of cardiac muscle, heart wall rupture, and ischemia reperfusion injury.

[0320] While several different therapeutic approaches are currently available to manage cardiovascular disease, e.g., heart failure, the incidence, prevalence, and economic costs of the disease are steadily increasing. The overall prevalence of congestive heart failure (CHF) is 1 to 2% in middle-aged and older adults, reaches 2 to 3% in patients older than age 65 years, and is 5 to 10% in patients beyond the age of 75 years (Yamani et al. (1993) Mayo Clin. Proc. 68:1214-1218).

[0321] Survival of patients suffering from heart failure depends on the duration and severity of the disease, on gender, as well as on previously utilized therapeutic strategies. In the Framingham study, the overall 5-year survival rates were 25% in men and 38% in women (Ho et al., (1993) Circulation 88:107-115). In clinical trials with selected patients under state-of-the-art medical therapy, 1 year mortality ranged between 35% in patients with severe congestive heart failure (NYHA IV) in the Consensus trial (The Consensus Trial Study Group (1987) N Engl. J. Med. 316:1429-1435) to 9 and 12% in patients with moderate CHF (NYHA II-III) in the second Vasodilator Heart Failure Trial (Cohn et al. (1991) N. Engl. J. Med. 325:303-310) and the Studies of Left Ventricular Dysfunction (SOLVD) trial. Mechanisms of death included sudden death in about 40%, and other factors in 20% of the patients.

[0322] The NABTs of the invention can be employed to diminish or alleviate the pathological symptoms associated with cardiac cell death due to apoptosis of heart cells. Initially the NABTs of interest will be incubated with a cardiac cell and the ability of the NABT to modulate targeted gene function (e.g., reduction in production of target gene product, apoptosis, improved cardiac cell signaling, Ca++ transport, or morphology etc) will be assessed. For example, the H9C2 cardiac muscle cell line can be obtained from American Type Culture Collection (Manassas, Va., USA) at passage 14 and cultured in DMEM complete culture medium (DMEM/F12 supplemented with 10% fetal calf serum (FCS), 2 mM α-glutamine, 0.5 mg/l Fungizone and 50 mg/l gentamicin). This cell line is suitable for characterizing the inhibitory functions of the NABTs of the invention and for characterization of modified versions thereof. HL-1 cells, described by Clayton et al. (1998) PNAS 95:2979-2984, can be repeatedly passaged and yet maintain a cardiac-specific phenotype. These cells can also be used to further characterize the effects of the NABTs described herein.

[0323] It may be desirable to further test the NABTs of the invention in animal models of heart failure. The tables below from Hasenfuss (1998) (Cardiovascular Research 39:60-76) provide a variety of animal models that are suitable for use in this embodiment of the invention. Each of the animal models described is useful for testing a biochemical parameter modulated by the NABTs provided herein. The skilled person can readily select the appropriate animal model and assess the effects of the NABT for its ability to ameliorate the symptoms associated with heart disease.

[0324] Heart failure is a serious condition that results from various cardiovascular diseases. p53 plays a significant role in the development of heart failure. Cardiac angiogenesis directly related to the maintenance of cardiac function as well as the development of cardiac hypertrophy induced by pressure-overload, and upregulated p53 induced the transition from cardiac hypertrophy to heart failure through the suppression of hypoxia inducible factor-1(HIF-1), which regulates angiogenesis in the hypertrophied heart. In addition, p53 is known to promote apoptosis, and apoptosis is thought to be involved in heart failure. Thus, p53 is a key molecule which triggers the development of heart failure via multiple mechanisms.

[0325] It appears that expression of the apoptosis regulator p53 is governed, in part, by a molecule that in mice is termed murine double minute 2 (MDM2), or, in man, human double minute 2 (HDM2), an E3 enzyme that targets p53 for ubiquitination and proteasomal processing, and by the deubiquitinating enzyme, herpesvirus-associated ubiquitin-specific protease (HAUSP), which rescues p53 by removing ubiquitin chains from it. Birks et al. (Cardiovasc Res. 2008 Aug. 1; 79(3): 472-80) examined whether elevated expression of p53 was associated with dysregulation of ubiquitin-proteasome system (UPS) components and activation of downstream effectors of apoptosis in human dilated cardiomyopathy (DCM). In these studies, left ventricular myocardial samples were obtained from patients with DCM (n=12) or from non-failing (donor) hearts (n=17). Western blotting and immunohistochemistry revealed that DCM tissues contained elevated levels of p53 and its regulators HDM2, MDM2 or the homologs thereof found in other species, and HAUSP (all P<0.01) compared with non-failing hearts. DCM tissues also contained elevated levels of polyubiquitinated proteins and possessed enhanced 20S-proteasome chymotrypsin-like activities (P<0.04) as measured in vitro using a fluorogenic substrate. DCM tissues contained activated caspases −9 and −3 (P<0.001) and reduced expression of the caspase substrate PARP-1 (P<0.05). Western blotting and immunohistochemistry revealed that DCM tissues contained elevated expression levels of caspase-3-activated DNAse (CAD; P<0.001), which is a key effector of DNA fragmentation in apoptosis and also contained elevated expression of a potent inhibitor of CAD (ICAD-S; P<0.01). These investigators concluded that expression of p53 in human DCM is associated with dysregulation of UPS components, which are known to regulate p53 stability. Elevated p53 expression and caspase activation in DCM was not associated with activation of both CAD and its inhibitor, ICAD-S. These findings are consistent with the concept that apoptosis may be interrupted and therefore potentially reversible in human HF.

[0326] In view of the foregoing, it is clear that the NABTs directed to p53 provided in Table 8 and 23 should exhibit efficacy for the treatment of heart failure. Accordingly, in one embodiment of the invention, the effects of p53 directed NABTs and their effects on cardiac cell apoptosis can be determined.

[0327] Additional NABTs for this purpose include, but are not limited to those targeting BCL-X, (Bcl-2-like 1; BCL2L1; BCL2L: Bcl-xS), FAS/APO1, Pro-apoptotic form of gene product, DB-1, (ZNF161; VEZF1), ICE (CASP1; Caspase-1), NF-kappaB, (Includes 51 KD, 65 KD and A subunits as well as intron 15), p53, PKC alpha, SRF and VEGF. In certain applications it may be desirable to conjugate the NABT to the CPP heart homing peptides described above. Preferred and most preferred NABT chemistries are described elsewhere herein.

[0328] Recently, Feng et al. reported that during myocardial ischemia, cardiomyocytes can undergo apoptosis or compensatory hypertrophy (Coron Artery Dis. 2008 November; 19(7):527-34). Fas expression is upregulated in the myocardial ischemia and is coupled to both apoptosis and hypertrophy of cardiomyocytes. Some reports suggested that Fas might induce myocardial hypertrophy. Apoptosis of ischemic cardiomyocytes and Fas expression in the nonischemic cardiomyocytes occurs during the early stage of ischemic heart failure. Hypertrophic cardiomyocytes easily undergo apoptosis in response to ischemia, after which apoptotic cardiomyocytes are replaced by fibrous tissue. In the late stage of ischemic heart failure, hypertrophy, apoptosis, and fibrosis are thought to accelerate each other and might thus form a vicious circle that eventually results in heart failure. Based on these observations, it is clear that NABTs targeting Fas provide useful therapeutic agents for ameliorating the pathological effects associated with myocardial ischemia and hypertrophy. Accordingly, fas directed NABTs will be applied to cardiac cells and their effects on apoptosis assessed. Fas directed NABTs will also be administered to animal models of heart failure to further characterize these effects. As discussed above in relation to p53 targeted NABTs, certain modifications of the NABT will also be assessed. These include conjugation to heart homing peptides, alterations to the phosphodiester backbone to improve bioavailability and stability, inclusion of CPPs, as well as encapusulation in liposomes or nanoparticles as appropriate.

[0329] Caspase-1/interleukin-converting enzyme (ICE) is a cysteine protease traditionally considered to have importance as an inflammatory mediator. Syed et al. examined the consequences of increased myocardial expression of procaspase-1 on the normal and ischemically injured heart (Circ Res. 2005 May 27; 96(10): 1103-9). In unstressed mouse hearts with a 30-fold increase in procaspase-1 content, unprocessed procaspase-1 was well tolerated, without detectable pathology. Cardiomyocyte processing and activation of caspase-1 and caspase-3 occurred after administration of endotoxin or with transient myocardial ischemia. In post-ischemic hearts, procaspase-1 overexpression was associated with strikingly increased cardiac myocyte apoptosis in the peri- and noninfarct regions and with 50% larger myocardial infarctions. Tissue culture studies revealed that procaspase-1 processing/activation is stimulated by hypoxia, and that caspase-1 acts in synergy with hypoxia to stimulate caspase-3 mediated apoptosis without activating upstream caspases. These data demonstrate that the proapoptotic effects of caspase-1 can significantly impact the myocardial response to ischemia and suggest that conditions in which procaspase-1 in the heart is increased may predispose to apoptotic myocardial injury under conditions of physiological stress. In view of these findings, NABTs directed to caspase 1 (ICE in Table 8) provide efficacious agents for the treatment of myocardial ischemia. Cardiac cells will be contacted with NABTs directed to ICE and the effects on cardiac cell apoptosis will be assessed. As mentioned previously, additional cardiac specific biochemical parameters such as Ca++ signaling, contractility, beta-adrenergic signaling, and cellular morphology can also be assessed. As above, several modifications can be engineered into the NABTs directed to ICE to increase cardiac cell homing, in vivo bioavailability and stability. These modified NABTs can then be further characterized in animal models of heart failure and hypertrophy.

[0330] Cardiac hypertrophy and dilation are also mediated by neuroendocrine factors and/or mitogens as well as through internal stretch- and stress-sensitive signaling pathways, which in turn transduce alterations in cardiac gene expression through specific signaling pathways. The transcription factor family known as myocyte enhancer factor 2 (MEF2 or MADS) has been implicated as a signal-responsive mediator of the cardiac transcriptional program. For example, known hypertrophic signaling pathways that utilize calcineurin, calmodulin-dependent protein kinase, and MAPKs can each affect MEF2 activity. Xu et al. demonstrate that MEF2 transcription factors induced dilated cardiomyopathy and lengthening of myocytes (J. Biol. Chem. (2006) Apr. 7; 281(14):9152-62). Specifically, multiple transgenic mouse lines with cardiac-specific overexpression of MEF2A or MEF2C presented with cardiomyopathy at base line or were predisposed to more fulminant disease following pressure overload stimulation. The cardiomyopathic response associated with MEF2A and MEF2C was not further altered by activated calcineurin, suggesting that MEF2 (MADS/MEF-2 in Table 8) functions independently of calcineurin in this response. In cultured cardiomyocytes, MEF2A, MEF2C, and MEF2-VP16 (a constitutively active mutant of MEF-2) overexpression induced sarcomeric disorganization and focal elongation. Mechanistically, MEF2A and MEF2C each programmed similar profiles of altered gene expression in the heart that included extracellular matrix remodeling, ion handling, and metabolic genes. Indeed, adenoviral transfection of cultured cardiomyocytes with MEF2A or of myocytes from the hearts of MEF2A transgenic adult mice showed reduced transient outward K(+) currents, consistent with the alterations in gene expression observed in transgenic mice and partially suggesting a proximal mechanism underlying MEF2-dependent cardiomyopathy. Based on the foregoing, NABTs directed to MEF-2 should have efficacy for the treatment of cardiomyopathy. Cardiomyocytes will be cultured in the presence of MEF-2 NABTs and the effects cardiac cell morphology and function will be determined to optimize dosage. As above, modifications to the NABTs directed to MEF-2 can also be assessed in the appropriate animal model provided below. As mentioned above, the animal models of cardiovascular disease listed in the following tables provide ideal in vivo models for optimizing the therapeutic efficacy and dosage of NABTs administration for the treatment of cardiovascular disease.

Animal models of heart failure

| Species and | | |
|---|---|---|
| technique | Selected references | Comments |
| Rat | | |
| Coronary | Pfeffer et al. (1979); Kajstura et al. (1994); | Clinical characteristics similar |
| ligation | Zarain-Herzberg et al. (1996); Liu et al. (1997) | to human CHF; survival studies |
| Aortic banding | Feldman et al. (1993); Weinberg et al. (1994); | Studies of transition from |
| | Shunkert et al. (1994) | hypertrophy to failure; survival |
| | | studies |
| Salt-sensitive | Dahl et al. (1962); Inoko et al. (1994) | Studies of transition from |
| hypertension | | hypertrophy to failure |
| Spontaneous | Okamoto et al. (1963); Bing et al. (1991); Boluyt | Extracellular matrix changes; |
| hypertension | et al. (1994); Li et al. (1997) | apoptosis; studies of transition |
| | | from hypertrophy to failure |
| SH-HF/Mcc-facp | Chua et al. (1996); Holycross et al. (1997); | Altered NOS expression; |
| | Narayan et al. (1995); Gomez et al. (1997); | altered calcium triggered |
| | Khaour et al. (1997) | calcium release |
| Aorto-caval | Jannini et al. (1996); Liu et al. (1991) | Left ventricular hypertrophy; |
| fistula | | moderate LV dysfunction |
| Toxic | Fein et al. (1994); Teerlink et al. (1994); Capasso | Decreased myocardial |
| cardiomyopathy | et al. (1992); Wei et al. (1997) | performance; myocyte loss with |
| | | chronic ethanol application. |
| | | Cardiomyopathy following |
| | | catecholamine infusion or |
| | | associated with Diabetes |
| | | mellitus |
| Dog | | |
| Pacing | Whipple G. H, et al. (1961); Armstrong P. W, et al. | Studies of remodeling and |
| tachycardia | (1986); Wilson J. R, et al. (1987); Ohno M, et al. | neurohumoral activation; |
| | (1994); Kiuchi K, et al. (1994); Armstrong P W, et | studies on molecular |
| | al. (1996); Eaton G. M, et al. (1995); Travill C. M, | mechanism of subcellular |
| | et al. (1992); Redfield M. M, et al. (1993); Luchner | dysfunction; no hypertrophy |
| | A, et al. (1996); Wang J, et al. (1994); Wolff M. R, | |
| | et al. (1995); O'Leary E. L, et al. (1992); Spinale | |
| | F. G, et al. (1995); Liu Y, et al. (1995); Ishikawa Y, | |
| | et al. (1994); Pak P. H, et al. (1997); Nuss H. B, et | |
| | al. (1996). | |
| Coronary artery | Sabbah H. N, et al. (1991); Gengo P. J, et al. (1992); | Studies on progression of heart |
| ligation | Gupta R. C, et al. (1997); Sabbah H. N, et al. (1994); | failure; high mortality and |
| | McDonald K. M, et al. (1992). | arrhythmias |
| Direct-current | McDonald K. M, et al. (1992). | Studies of neurohumoral |
| shock | | mechanisms |
| Volume overload- | McCullagh W. H, et al. (1972); Kleaveland J. P, et | Studies of neurohumoral |
| aorto-caval | al. (1988); Dell'Italia L. J. (1995); Nagatsu M, et al. | mechanisms and therapeutic |
| fistula-mitral | (1994); Tsutsui H, et al. (1994). | interventions |
| regurgitation | | |
| Vena caval | Wei C. M, et al. (1997). | Low cardiac output failure |
| constriction | | |
| Toxic | Magovern J. A, et al. (1992). | Left ventricular dysfunction |
| cardiomyopathy | | |
| Genetic | Cory C. R, et al. (1994). | Spontaneous cardiomyopathy in |
| | | Doberman Pinscher dogs |
| Pig | | |
| Pacing | Spinale F. G, et al. (1992); Spinale F. G, et al. | Comparable with dog model for |
| tachycardia | (1990); Spinale F. G, et al. (1991); Spinale F. G, et | most aspects |
| | al. (1994). | |
| Coronary artery | Zhang J, et al. (1996). | Congestive heart failure; altered |
| ligation | | myocardial energetic |
| Rabbit | | |
| Volume and | Magid N.M, et al. (1994); Gilson N, et al. (1990); | Myocardial alterations similar |
| pressure | Ezzaher A, et al. (1991); Ezzaher A, et al. (1992); | to failing human myocardium |
| overload | Pogwizd S. M, et al. (1997). | |
| Pacing | Freeman G. L, et al. (1992); Masaki H, et al. | Myocardial alteration similar to |
| tachycardia | (1993); Masaki H, et al. (1994); Ryu K. H, et al. | failing human myocardium |
| | (1997); Eble D. M, et al. (1997), Colston J. T, et al. | |
| | (1994). | |
| Toxic | Dodd D. A, et al. (1993). | Studies of functional |
| cardiomyopathy | | consequences of altered |
| | | ryanodine receptors |
| Guinea pig | | |
| Aortic banding | Kiss E, et al. (1995); Malhotra A, et al. (1992); Siri | Myocardial function and |
| | F. M, et al. (1989). | alteration of calcium handling |
| | | similar to human heart failure |
| Syrian hamster | | |
| Genetic | Bajusz E. (1969); Forman R, et al. (1972). Jasmin | Hypertrophy and failure; |
| | G, et al. (1982); Rouleau J. L, et al. (1982); | alterations critically dependent |
| | Whitmer J. T, et al. (1988); Finkel M. S, et al. | on strain and age |
| | (1987); Wagner J. A, et al. (1986); Kuo T. H, et al. | |
| | (1992); Hatem S. N, Set al. (1994); Malhotra A, et | |
| | al. (1985); Okazaki Y, et al. (1996); Nigro V, et al. | |
| | (1997). | |
| Cat | | |
| Pulmonary artery | Tagawa H, et al. (1996); Kent R. L, et al. (1993). | Transition from compensated |
| constriction | | right ventricular hypertrophy to |
| | | failure |
| Turkey | | |
| Toxic | Genao A, et al. (1996). | Alteration of calcium handling |
| cardiomyopathy | | and myocardial energetic |
| Bovine | | |
| Genetic | Eschenhagen T, et al. (1995). | Similar to human heart failure |
| | | regarding changes in (β- |
| | | adrenergic system |
| Sheep | | |
| Pacing | Rademaker M. T, et al. (1997); Rademaker M. T, | Similar to dog and swine model |
| tachycardia | et al. (1996). | of pacing tachycardia |
| Aortic | Aoyagi T, et al. (1993). | Transition from compensated |
| constriction | | hypertrophy to left ventricular |
| | | dysfunction |

[0331] Pfeffer M. A, Pfeffer J. M, Fishbein M. C, et al. Myocardial infarct size and ventricular function in rats. Circ Res 44:503-512.
[0332] Kajstura J, Zhang X, Reiss K, et al. Myocyte cellular hyperplasia and myocyte cellular hypertrophy contribute to chronic ventricular remodeling in coronary artery narrowing-induced cardiomyopathy in rats. Circ Res (1994) 74:383-400.
[0333] Zarain-Herzberg A, Afzal N, Elimban V, Dhalla N. S. Decreased expression of cardiac sarcoplasmic reticulum Ca2+-pump ATPase in congestive heart failure due to myocardial infarction. Mol Cell Biochem (1996) 163, 164:285-290.
[0334] Liu Y. H, Yang X. P, Nass O, et al. Chronic heart failure induced by coronary artery ligation in Lewis inbred rats. Am J Physiol (1997) 272:H722-727.
[0335] Feldman A. M, Weinberg E. O, Ray P. E, Lorell B. H. Selective changes in cardiac gene expression during compensated hypertrophy and the transition to cardiac decompensation in rats with chronic aortic banding. Circ Res (1993) 73:184-192.
[0336] Weinberg E. O, Schoen F. J, George D, et al. Angiotensin-converting enzyme inhibition prolongs survival and modifies the transition to heart failure in rats with pressure overload hypertrophy due to ascending aortic stenosis. Circulation (1994) 90:1410-1422.
[0337] Schunkert H, Lorell B. H. Role of angiotensin II in the transition of left ventricular hypertrophy to cardiac failure. Heart Failure (1994) 10:142-149.
[0338] Okamoto K, Aoki K. Development of a strain of spontaneously hypertensive rats. Jpn Circ J (1963) 27:282-293.
[0339] Bing O. H, Brooks W. W, Conrad C. H, et al. Intracellular calcium transients in myocardium from spontaneously hypertensive rats during the transition to heart failure. Circ Res (1991) 68:1390-1400.
[0340] Boluyt M. O, O'Neill L, Meredith A. L, et al. Alterations in cardiac gene expression during the transition from stable hypertrophy to heart failure. Marked upregulation of genes encoding extracellular matrix components. Circ Res (1994) 75:23-32.
[0341] Li Z, Bing O. H, Long X, Robinson K. G, Lakatta E. G. Increased cardiomyocyte apoptosis during the transition to heart failure in the spontaneously hypertensive rat. Am J Physiol (1997) 272:H2313-H2319.
[0342] Chua S. C Jr., Chung W. K, Wu-Peng X. S. Phenotypes of mouse diabetes and rat fatty due to mutations in the OB (leptin) receptor. Science (1996) 271:994-996.
[0343] Holycross B. J, Summers B. M, Dunn R. B, McCune S. A. Plasma-renin activity in heart failure-prone SHHF/Mcc-facp rats. Am J Physiol (1997) 273:H228-H233.
[0344] Narayan P, McCune S. A, Robitaille P. M, Hohl C. M, Altschuld R. A. Mechanical alternans and the force-frequency relationship in failing rat hearts. J Mol Cell Cardiol (1995) 27:523-530.
[0345] Gomez A. M, Valdivia H. H, Cheng H, et al. Defective excitation-contraction coupling in experimental cardiac hypertrophy and heart failure. Science (1997) 276:800-806.
[0346] Khadour F. H, Kao R. H, Park S, et al. Age-dependent augmentation of cardiac endothelial NOS in a genetic rat model of heart failure. Am J Physiol (1997) 273:H1223-H1230.
[0347] Lompre A. M, Mercadier J. J, Wisnewsky C, et al. Species and age-dependent changes in the relative amounts of cardiac myosin isozymes in mammals. Dev Biol (1981) 84:286-290.
[0348] Jannini J. P, Spinale F. G. The identification of contributory mechanisms for the development and progression of congestive heart failure in animal models. J Heart Lung Transplant (1996) 15:1138-1150.
[0349] Liu Z, Hilbelink D. R, Crockett W. B, Gerdes A. M. Regional changes in hemodynamics and cardiac myocyte size in rats with aortocaval fistulas. Developing and established hypertrophy. Circ Res (1991) 69:52-58.
[0350] Fein F. S, Sonnenblick E. H. Diabetic cardiomyopathy. Cardiovasc Drugs Ther (1994) 8:65-73.
[0351] Teerlink J. R, Pfeffer J. M, Pfeffer M. A. Progressive ventricular remodeling in response to diffuse isoproterenol-induced myocardial necrosis in rats. Circ Res (1994) 75:105-113.
[0352] Capasso J. M, Li P, Guideri G, et al. Myocardial mechanical, biochemical and structural alterations induced by chronic ethanol ingestion in rats. Circ Res (1992) 71:346-356.
[0353] Wei C. M, Clavell A. L, Burnett J. C. Atrial and pulmonary endothelin mRNA is increased in a canine model of chronic low cardiac output. Am J Physiol (1997) 273:R838-844.
[0354] Whipple G. H, Sheffield L. T, Woodman E. G, Thoephilis C, Friedman S. Reversible congestive heart failure due to rapid stimulation of the normal heart. Proc New Eng Cardiovasc Soc (1961) 20:39-40.
[0355] Armstrong P. W, Stopps T. P, Ford S. E, de Bold A. J. Rapid ventricular pacing in the dog: pathophysiologic studies of heart failure. Circulation (1986) 74:1075-1084.
[0356] Wilson J. R, Douglas P, Hickey W. F, et al. Experimental congestive heart failure produced by rapid ventricular pacing in the dog: cardiac effects. Circulation (1987) 75:857-867.
[0357] Ohno M, Cheng C. P, Little W. C. Mechanism of altered patterns of left ventricular filling during the development of congestive heart failure. Circulation (1994) 89:2241-2250.
[0358] Kiuchi K, Shannon R. P, Sato N, et al. Factors involved in delaying the rise in peripheral resistance in developing heart failure. Am J Physiol (1994) 267:H211-H216.
[0359] Armstrong P W, Gordon W M. The development of and recovery from pacing-induced heart failure. In: Spinale F G, editor. Pathophysiology of tachycardia-induced heart failure. Armonk, N.Y.: Futura Publishing Company, 1996; 45-59.
[0360] Eaton G. M, Cody R. J, Nunziata E, Binkley P. F. Early left ventricular dysfunction elicits activation of sympathetic drive and attenuation of parasympathetic tone in the paced canine model of congestive heart failure. Circulation (1995) 92:555-561.
[0361] Travill C. M, Williams T. D, Pate P, et al. Haemodynamic and neurohumoral response in heart failure produced by rapid ventricular pacing. Cardiovasc Res (1992) 26:783-790.
[0362] Redfield M. M, Aarhus L. L, Wright R. S, Burnett J. C Jr. Cardiorenal and neurohumoral function in a canine model of early left ventricular dysfunction. Circulation (1993) 87:2016-2022.
[0363] Luchner A, Stevens T. L, Borgeson D. D, et al. Angiotensin II in the evolution of experimental heart failure. Hypertension (1996) 28:472-477.
[0364] Wang J, Seyedi N, Xu X. B, Wolin M. S, Hintze T. H. Defective endothelium-mediated control of coronary circulation in conscious dogs after heart failure. Am J Physiol (1994) 266:H670-H680.
[0365] Wolff M. R, Whitesell L. F, Moss R. L. Calcium sensitivity of isometric tension is increased in canine experimental heart failure. Circ Res (1995) 76:781-789.
[0366] O'Leary E. L, Colston J. T, Freeman G. L. Maintained length-dependent activation of skinned myocardial fibers in tachycardia heart failure. Circulation (1992) 86(suppl I):284.
[0367] Spinale F. G, Holzgrefe H. H, Mukherjee R, et al. Angiotensin-converting enzyme inhibition and the progression of congestive cardiomyopathy. Effects on left ventricular and myocyte structure and function. Circulation 92:562-578.
[0368] Liu Y, Cigola E, Cheng W, et al. Myocyte nuclear mitotic division and programmed myocyte cell death characterize the cardiac myopathy induced by rapid ventricular pacing in dogs. Lab Invest (1995) 73:771-787.
[0369] Ishikawa Y, Sorota S, Kiuchi K, et al. Downregulation of adenylylcyclase types V and VI mRNA levels in pacing-induced heart failure in dogs. J Clin Invest (1994) 93:2224-2229.
[0370] Pak P. H, Nuss H. B, Kaab S, et al. Repolarization abnormalities, arrhythmia and sudden death in canine tachycardia induced cardiomyopathy. J Am Coll Cardiol (1997) 30:576-584.
[0371] Nuss H. B, Johns D. C, Kaab S, et al. Reversal of potassium channel deficiency in cells from failing hearts by adenoviral gene tranfer: a prototype for gene therapy for disorders of cardiac excitability and contractility. Gene Ther (1996) 3:900-912.
[0372] Sabbah H. N, Stein P. D, Kono T, et al. A canine model of chronic heart failure produced by multiple sequential coronary microembolizations. Am J Physiol (1991) 260:H1379-H1384.
[0373] Gengo P. J, Sabbah H. N, Steffen R. P, et al. Myocardial beta adrenoceptor and voltage-sensitive calcium channel changes in a canine model of chronic heart failure. J Mol Cell Cardiol (1992) 24:1361-1369.
[0374] Gupta R. C, Shimoyama H, Tanimura M, et al. SR Ca²⁺-ATPase activity and expression in ventricular myocardium of dogs with heart failure. Am J Physiol (1997) 273:H12-H18.
[0375] Sabbah H. N, Shimoyama H, Kono T, et al. Effects of long-term monotherapy with enalapril, metoprolol, and digoxin on the progression of left ventricular dysfunction and dilation in dogs with reduced ejection fraction. Circulation (1994) 89:2852-2859.
[0376] McDonald K. M, Francis G. S, Carlyle P. F, et al. Hemodynamic, left ventricular structural and hormonal changes after discrete myocardial damage in the dog. J Am Coll Cardiol (1992) 19:460-467.
[0377] McCullagh W. H, Covell J. W, Ross J Jr. Left ventricular dilatation and diastolic compliance changes during chronic volume overloading. Circulation (1972) 45:943-951.
[0378] Kleaveland J. P, Kussmaul W. G, Vinciguerra T, Diters R, Carabello B. A. Volume overload hypertrophy in a closed-chest model of mitral regurgitation. Am J Physiol (1988) 254:H1034-H1041.
[0379] Dell'Italia L. J. The canine model of mitral regurgitation. Heart Failure (1995) 11:208-218.
[0380] Nagatsu M, Zile M. R, Tsutsui H, et al. Native beta-adrenergic support for left ventricular dysfunction in experimental mitral regurgitation normalizes indexes of pump and contractile function. Circulation (1994) 89:818-826.
[0381] Tsutsui H, Spinale F. G, Nagatsu M, et al. Effects of chronic beta-adrenergic blockade on the left ventricular and cardiocyte abnormalities of chronic canine mitral regurgitation. J Clin Invest (1994) 93:2639-2648.
[0382] Wei C. M, Clavell A. L, Burnett J. C. Atrial and pulmonary endothelin mRNA is increased in a canine model of chronic low cardiac output. Am J Physiol (1997) 273:R838-844.
[0383] Magovern J. A, Christlieb I. Y, Badylak S. F, Lantz G. C, Kao R. L. A model of left ventricular dysfunction caused by intracoronary adriamycin. Ann Thorac Surg (1992) 53:861-863.
[0384] Cory C. R, Shen H, O'Brien P. J. Compensatory asymmetry in down-regulation and inhibition of the myocardial Ca²⁺ cycle in congestive heart failure produced in dogs by idiopathic dilated cardiomyopathy and rapid ventricular pacing. J Mol Cell Cardiol (1994) 26:173-184.
[0385] Spinale F. G, Fulbright B. M, Mukherjee R, et al. Relation between ventricular and myocyte function with tachycardia-induced cardiomyopathy. Circ Res (1992) 71:174-187.
[0386] Spinale F. G, Hendrick D. A, Crawford F. A, et al. Chronic supraventricular tachycardia causes ventricular dysfunction and subendocardial injury in swine. Am J Phys (1990) 259:H218-H229.
[0387] Spinale F. G, Tomita M, Zellner J. L, et al. Collagen remodeling and changes in LV function during development and recovery from supraventricular tachycardia. Am J Physiol (1991) 261:H308-H318.
[0388] Spinale F. G, Tempel G. E, Mukherjee R, et al. Cellular and molecular alterations in the beta adrenergic system with cardiomyopathy induced by tachycardia. Cardiovasc Res (1994) 28:1243-1250.
[0389] Zhang J, Wilke N, Wang Y, et al. Functional and bioenergetic consequences of postinfarction left ventricular remodeling in a new porcine model. MRI and 31 P-MRS study. Circulation (1996) 94:1089-1100.
[0390] Magid N. M, Opio G, Wallerson D. C, Young M. S, Borer J. S. Heart failure due to chronic experimental aortic regurgitation. Am J Physiol (1994) 267:H556-H562.
[0391] Gilson N, el Houda Bouanani N, Corsin A, Crozatier B. Left ventricular function and beta-adrenoceptors in rabbit failing heart. Am J Physiol (1990) 258:H634-H641.
[0392] Ezzaher A, Bouanani N. E. H, Su J. B, Hittinger L, Crozatier B. Increased negative inotropic effect of calcium channel blockers in hypertrophied and failing rabbit hearts. J Pharmacol Exp Ther (1991) 257:466-471.
[0393] Ezzaher A, Boudanani N. E. H, Crozatier B. Force-frequency relations and response to ryanodine in failing rabbit hearts. Am J Physiol (1992) 263:H1710-H1715.
[0394] Pogwizd S. M, Qi M, Samarel A. M, Bers D. M. Upregulation of Na⁺/Ca²⁺-exchanger gene expression in an arrhythmogenic model of nonischemic cardiomyopathy in the rabbit. Circulation (1997) 96(Suppl I):8.
[0395] Freeman G. L, Colston J. T. Myocardial depression produced by sustained tachycardia in rabbits. Am J Physiol 262:H63-H67.
[0396] Masaki H, Imaizumi T, Ando S, et al. Production of chronic congestive heart failure by rapid ventricular pacing in the rabbit. Cardiovasc Res (1993) 27:828-831.
[0397] Masaki H, Imaizumi T, Harasawa Y, Takeshita A. Dynamic arterial baroreflex in rabbits with heart failure induced by rapid pacing. Am J Physiol (1994) 267:H92-H99.
[0398] Ryu K. H, Tanaka N, Dalton N, et al. Force-frequency relations in the failing rabbit heart and responses to adrenergic stimulation. J Card Fail (1997) 3:27-39.
[0399] Eble D. M, Walker J. D, Mukherjee R, Samarel A. M, Spinale F. G. Myosin heavy chain synthesis is increased in a rabbit model of heart failure. Am J Physiol (1997) 272:H969-H978.
[0400] Siri F. M, Nordin C, Factor S. M, Sonnenblick E, Aronson R. Compensatory hypertrophy and failure in gradual pressure-overloaded guinea pig heart. Am J Physiol (1989) 257:H1016-H1024.
[0401] Bajusz E. Hereditary cardiomyopathy: a new disease model. Am Heart J (1969) 7:686-696.
[0402] Forman R, Parmley W. W, Sonnenblick E. H. Myocardial contractility in relation to hypertrophy and failure in myopathic Syrian hamsters. J Mol Cell Cardiol (1972) 4:203-211.
[0403] Jasmin G, Proschek L. Hereditary polymyopathy and cardiomyopathy in the Syrian hamster. I. Progression of heart and skeletal muscle lesions in the UM-X7.1 line. Muscle Nerve (1982) 5:20-25.
[0404] Rouleau J. L, Chuck L. H, Hollosi G, et al. Verapamil preserves myocardial contractility in the hereditary cardiomyopathy of the Syrian hamster. Circ Res (1982) 50:405-412.
[0405] Whitmer J. T, Kumar P, Solaro R. J. Calcium transport properties of cardiac sarcoplasmic reticulum from cardiomyopathic Syrian hamsters (BIO 53.58 and 14.6): evidence for a quantitative defect in dilated myopathic hearts not evident in hypertrophic hearts. Circ Res (1988) 62:81-85.
[0406] Finkel M. S, Marks E. S, Patterson R. E, et al. Correlation of changes in cardiac calcium channels with hemodynamics in Syrian hamster cardiomyopathy and heart failure. Life Sci (1987) 41:153-159.
[0407] Wagner J. A, Reynolds I. J, Weisman H. F, et al. Calcium antagonist receptors in cardiomyopathic hamster: selective increases in heart, muscle, brain. Science (1986) 232:515-518.
[0408] Kuo T. H, Tsang W, Wang K. K, Carlock L. Simultaneous reduction of the sarcolemmal and SR calcium ATPase activities and gene expression in cardiomyopathic hamster. Biochim Biophys Acta (1992) 1138:343-349.
[0409] Hatem S. N, Sham J. S, Morad M. Enhanced Na⁺/Ca²⁺ exchange activity in cardiomyopathic Syrian hamster. Circ Res (1994) 74:253-261.
[0410] Malhotra A, Karell M, Scheuer J. Multiple cardiac contractile protein abnormalities in myopathic Syrian hamsters (BIO 53: 58). J Mol Cell Cardiol (1985) 17:95-107.
[0411] Okazaki Y, Okuizumi H, Osumi T, et al. A genetic linkage map of the Syrian hamster and localization of cardiomyopathy locus on chromosome 9qa2.1-b1 using RLGS spot-mapping. Nat Genet (1996) 13:87-90.
[0412] Nigro V, Okazaki Y, Belsito A, et al. Identification of the Syrian hamster cardiomyopathy gene. Hum Mol Gen (1997) 6:601-607.
[0413] Tagawa H, Koide M, Sato H, Cooper G 4th. Cytoskeletal role in the contractile dysfunction of cardiocytes from hypertrophied and failing right ventricular myocardium. Proc Assoc Am Physicians (1996) 108:218-229.
[0414] Kent R. L, Rozich J. D, McCollam P. L, et al. Rapid expression of the Na⁺/Ca²⁺ exchanger in response to cardiac pressure overload. Am J Physiol (1993) 265:H1024-H1029.
[0415] Genao A, Seth K, Schmidt U, Carles M, Gwathmey J. K. Dilated cardiomyopathy in turkeys: an animal model for the study of human heart failure. Lab Anim Sci (1996) 46:399-404.
[0416] Eschenhagen T, Diederich M, Kluge S. H, et al. Bovine hereditary cardiomyopathy: an animal model of human dilated cardiomyopathy. J Mol Cell Cardiol (1995) 27:357-370.
[0417] Rademaker M. T, Charles C. J, Lewis L. K, et al. Beneficial hemodynamic and renal effects of adrenomedullin in an ovine model of heart failure. Circulation (1997) 96:1983-1990.
[0418] Rademaker M. T, Charles C. J, Espiner E. A, et al. Natriuretic peptide responses to acute and chronic ventricular pacing in sheep. Am J Physiol (1996) 270:H594-H602.
[0419] Aoyagi T, Fujii A. M, Flanagan M. F, et al. Transition from compensated hypertrophy to intrinsic myocardial dysfunction during development of left ventricular pressure-overload hypertrophy in conscious sheep. Systolic dysfunction precedes diastolic dysfunction. Circulation (1993) 88:2415-2425.

Animal models of cardiac hypertrophy

| Species and technique | Selected references |
|---|---|
| Rat | |
| Aortic constriction | Feldman A. M, et al. (1993); |
| | Weinberg E. O, et al. (1994). |
| Pulmonary artery constriction | Julian F. J, et al. (1981). |
| Hypertension | |
| Renal ischemia | Goldblatt H, et al. (1934). |
| DOCA | Besse S, et al. (1994). |
| Dahl salt-sensitive | Dahl L. K, et al. (1962); |
| | Inoko M, et al. (1994). |
| SHR | Okamoto K, et al. (1963); |
| | Bing O. H, et al. (1991). |
| Arteriovenous fistula | Dart C. H Jr., et al. (1969). |
| Hyperthyroidism | Bartosova D, et al. (1969). |
| Hypoxia | Bartosova D, et al. (1969). |
| Catecholamines | Bartosova D, et al. (1969). |
| Exercise | Hickson R. C, et al. (1979); |
| | Rupp H, et al. (1982). |
| Rabbit | |
| Aortic insufficiency/ | Magid N. M, et al. (1994); |
| constriction | Gilson N, et al. (1990); |
| | Ezzaher A, et al. (1991). |
| Pulmonary constriction | Hasenfuss G, et al. (1991). |
| Hyperthyroidism | Hasenfuss G, et al. (1991). |
| Dog | |
| Aortic constriction | Koide M, et al. (1997). |
| Valvular aortic stenosis | Roitstein A, et al. (1995). |
| Tricuspid regurgitation | Dolber P. C, et al. (1994). |
| Pig | |
| Pulmonary artery constriction | Carroll S. M, et al. (1995). |
| Cat | |
| Pulmonary artery constriction | Tagawa H, et al. (1996). |
| Hamster | |
| Genetic | Bajusz E. (1969). |
| Ferret | |
| Pulmonary artery constriction | Do E, et al. (1997); Wang J, et al. (1994). |
| Sheep | |
| Aortic constriction | Charles C. J, et al. (1996). |
| Baboon | |
| Hyperthyroidism | Hoit B. D, et al. (1997). |
| Renal ischemia | Hoit B. D, et al. (1995). |
| Guinea pig | |
| Aortic constriction | Siri F. M, et al. (1989), Siri F. M, et al. |
| | (1991); Kiss E, et al. (1995) , Malhotra A, |
| | et al. (1992), Tweedie D, et al. (1995). |
| Mouse | |
| Renal ischemia | Wiesel P, et al. (1997). |
| Exercise | Kaplan M. L, et al. (1994). |
| Aortic constriction | Dorn G. W 2nd, et al. (1994). |

[0420] Feldman A. M, Weinberg E. O, Ray P. E, Lorell B. H. Selective changes in cardiac gene expression during compensated hypertrophy and the transition to cardiac decompensation in rats with chronic aortic banding. Circ Res (1993) 73:184-192.
[0421] Weinberg E. O, Schoen F. J, George D, et al. Angiotensin-converting enzyme inhibition prolongs survival and modifies the transition to heart failure in rats with pressure overload hypertrophy due to ascending aortic stenosis. Circulation (1994) 90:1410-1422.
[0422] Julian F. J, Morgan D. L, Moss R. L, Gonzalez M, Dwivedi P. Myocyte growth without physiological impairment in gradually induced rat cardiac hypertrophy. Circ Res (1981) 49:1300-1310.
[0423] Goldblatt H, Lynch J, Hanzak R. F, Summerville W. W. Studies of experimental hypertension; I. Production of persistent elevation of systolic blood pressure by means of renal ischemia. J Exp Med (1934) 59:347-379.
[0424] Besse S, Robert V, Assayag P, Delcayre C, Swynghedauw B. Nonsynchronous changes in myocardial collagen mRNA and protein during aging: effect of DOCA-salt hypertension. Am J Physiol (1994) 267:H2237-2244.
[0425] Dahl L. K, Heine M, Tassinari L. Role of genetic factors in susceptibility to experimental hypertension due to chronic excess salt ingestion. Nature (1962) 194:480-482.
[0426] Inoko M, Kihara Y, Morii I, Fujiwara H, Sasayama S. Transition from compensatory hypertrophy to dilated, failing left ventricles in Dahl salt-sensitive rats. Am J Physiol (1994) 267:H2471-H2482.
[0427] Okamoto K, Aoki K. Development of a strain of spontaneously hypertensive rats. Jpn Circ J (1963) 27:282-293.
[0428] Bing O. H, Brooks W. W, Conrad C. H, et al. Intracellular calcium transients in myocardium from spontaneously hypertensive rats during the transition to heart failure. Circ Res (1991) 68:1390-1400.
[0429] Dart C. H Jr., Holloszy J. O. Hypertrophied non-failing rat heart; partial biochemical characterization. Circ Res (1969) 25:245-253.
[0430] Bartosova D, Chvapil M, Korecky B, et al. The growth of the muscular and collagenous parts of the rat heart in various forms of cardiomegaly. J Physiol (Lond) (1969) 200:285-295.
[0431] Hickson R. C, Hammons G. T, Holloszy J. O. Development and regression of exercise-induced cardiac hypertrophy in rats. Am J Physiol (1979) 236:H268-H272.
[0432] Rupp H, Jacob R. Response of blood pressure and cardiac myosin polymorphism to swimming training in the spontaneously hypertensive rat. Can J Physiol Pharmacol (1982) 60:1098-1103.
[0433] Magid N. M, Opio G, Wallerson D. C, Young M. S, Borer J. S. Heart failure due to chronic experimental aortic regurgitation. Am J Physiol (1994) 267:H556-H562.
[0434] Gilson N, el Houda Bouanani N, Corsin A, Crozatier B. Left ventricular function and beta-adrenoceptors in rabbit failing heart. Am J Physiol (1990) 258:H634-H641.
[0435] Ezzaher A, Bouanani N. E. H, Su J. B, Hittinger L, Crozatier B. Increased negative inotropic effect of calcium channel blockers in hypertrophied and failing rabbit hearts. J Pharmacol Exp Ther (1991) 257:466-471.
[0436] Hasenfuss G, Mulieri L. A, Blanchard E. M, et al. Energetics of isometric force development in control and volume-overload human myocardium. Comparison with animal species. Circ Res (1991) 68:836-846.
[0437] Koide M, Nagatsu M, Zile M. R, et al. Premorbid determinants of left ventricular dysfunction in a novel model gradually induced pressure overload in the adult canine. Circulation (1997) 95:1601-1610.
[0438] Roitstein A, Chemberg B. V, Kedem J, et al. Reduced effect of phenylephrine on regional myocardial function and O₂ consumption in experimental LVH. Am J Physiol (1995) 268:H1202-H1207.
[0439] Dolber P. C, Bauman R. P, Rembert J. C, Greenfield J. C Jr. Regional changes in myocyte structure in model of canine right atrial hypertrophy. Am J Physiol (1994) 267:H1279-H1287.
[0440] Carroll S. M, Nimmo L. E, Knoepfler P. S, White F. C, Bloor C. M. Gene expression in a swine model of right ventricular hypertrophy: intercellular adhesion molecule, vascular endothelial growth factor and plasminogen activators are upregulated during pressure overload. J Mol Cell Cardiol (1995) 27:1427-1441.
[0441] Tagawa H, Koide M, Sato H, Cooper G 4th. Cytoskeletal role in the contractile dysfunction of cardiocytes from hypertrophied and failing right ventricular myocardium. Proc Assoc Am Physicians (1996) 108:218-229.
[0442] Bajusz E. Hereditary cardiomyopathy: a new disease model. Am Heart J (1969) 7:686-696.
[0443] Do E, Baudet S, Verdys M, et al. Energy metabolism in normal and hypertrophied right ventricle of the ferret heart. J Mol Cell Cardiol (1997) 29:1903-1913.
[0444] Wang J, Flemal K, Qiu Z, et al. Ca²⁺ handling and myofibrillar Ca²⁺ sensitivity in ferret cardiac myocytes with pressure-overload hypertrophy. Am J Physiol (1994) 267:H918-H924.
[0445] Charles C. J, Kaaja R. J, Espiner E. A, et al. Natriuretic peptides in sheep with pressure overload left ventricular hypertrophy. Clin Exp Hypertens (1996) 18:1051-1071.
[0446] Hoit B. D, Pawloski-Dahm C. M, Shao Y, Gabel M, Walsh R. A. The effects of a thyroid hormone analog on left ventricular performance and contractile and calcium cycling proteins in the baboon. Proc Assoc Am Physicians (1997) 109:136-145.
[0447] Hoit B. D, Shao Y, Gabel M, Walsh R. A. Disparate effects of early pressure overload hypertrophy on velocity-dependent and force-dependent indices of ventricular performance in the conscious baboon. Circulation (1995) 91:1213-1220.
[0448] Siri F. M, Nordin C, Factor S. M, Sonnenblick E, Aronson R. Compensatory hypertrophy and failure in gradual pressure-overloaded guinea pig heart. Am J Physiol (1989) 257:H1016-H1024.
[0449] Siri F. M, Krueger J, Nordin C, Ming Z, Aronson R. S. Depressed intracellular calcium transients and contraction in myocytes from hypertrophied and failing guinea pig hearts. Am J Phys (1991) 261:H514-H530.
[0450] Kiss E, Ball N. A, Kranias E. G, Walsh R. A. Differential changes in cardiac phospholamban and sarcoplasmic reticulum Ca²⁺-ATPase protein levels. Effects on Ca²⁺ transport and mechanics in compensated pressure-overload hypertrophy and congestive heart failure. Circ Res (1995) 77:759-764.
[0451] Malhotra A, Siri F. M, Aronson R. Cardiac contractile proteins in hypertrophied and failing guinea pig heart. Cardiovasc Res (1992) 26:153-161.
[0452] Tweedie D, Henderson C. G, Kane K. A. Assessment of subrenal banding of the abdominal aorta as a method of inducing cardiac hypertrophy in the guinea pig. Cardioscience (1995) 6:115-119.
[0453] Wiesel P, Mazzolai L, Nussberger J, Pedrazzini T. Hypertension. (1997) 29:1025-1030.
[0454] Kaplan M. L, Cheslow Y, Vikstrom K, et al. Cardiac adaptations to chronic exercise in mice. Am J Physiol (1994) 267:H1167-H1173.
[0455] Dorn G. W 2nd, Robbins J, Ball N, Walsh R. A. Myosin heavy chain regulation and myocyte contractile depression after LV hypertrophy in aortic-banded mice. Am J Physiol (1994) 267:H400-H405.

Transgenic models of heart failure and hypertrophy

| Intervention | Phenotype | Reference |
|---|---|---|
| Gene overexpression | | |
| C-myc | Myocardial hyperplasia | Jackson T, et al. (1990) |
| Epstein-Barr virus | Dilated cardiomyopathy | Huen D. S, et al. (1993). |
| nuclear antigen | | |
| Polyomavirus large | Cardiomyopathy | Chalifour L. E, et al. |
| T-antigen | | (1990). |
| Calmodulin | Myocardial hypertrophy | Gruver C. L, et al. (1993). |
| | and hyperplasia | |
| Myogenic factor 5 | Cardiomyopathy and | Edwards J. G, et al. (1996). |
| | Failure | |
| Gₛ α | Cardiomyopathy and | Iwase M, et al. (1997). |
| | Failure | |
| α₁-Adrenergic | Myocardial hypertrophy | Milano C. A, et al. (1994). |
| receptor | | |
| p21-ras | Myocardial hypertrophy; | Hunter J. J, et al. (1995). |
| | myofibrillar disarray | |
| Interleukin β and | Hypertrophy | Hirota H, et al. (1995). |
| interleukin β | | |
| receptor | | |
| Nerve growth | Cardiomyopathy | Hassankhani A, et al. |
| factor | | (1995). |
| Insulin-like | Cardiomyopathy; | Reiss K, et al. (1995). |
| growth factor 1 | Hyperplasia | |
| β-adrenergic | Reduced contractility | Rockman H. A, et al. |
| receptor Kinase | | (1995) |
| G protein coupled | Reduced contractility | Bertin B, et al. (1993). |
| receptor kinase | | |
| TGR (m Ren 2)27 | Hypertrophy in rats | Langheinrich M, et al. |
| | | (1996). |
| Gene mutation | | |
| α-cardiac myosin | Hypertrophic | Geisterfer-Lowrance |
| heavy | | A. A. T, et al. (1996). |
| Chain | Cardiomyopathy | |
| Lack of β-myosin | Hypertrophic | Welikson R. E, et al. (1997). |
| light | | |
| chain binding | Cardiomyopathy | |
| domain | | |
| Knockout of gene | | |
| Muscle LIM | Dilated cardiomyopathy | Arber S, et al. (1997). |
| protein | and failure | |
| Adenine nucleotide | Hypertrophy | Graham B. H, et al. (1997). |
| Translocator | | |
| Transforming | Myocarditis and failure | Shull M. M, et al. (1992). |
| growth factor β | | |
| Interferon | Myocarditis and failure | Aitken K, et al. (1994). |
| regulatory | | |
| factor 1 | | |

[0456] Jackson T, Allard M. F, Sreenan C. M, et al. The c-myc proto-oncogene regulates cardiac development in transgenic mice. Mol Cell Biol (1990) 10:3709-3716.
[0457] Huen D. S, Fox A, Kumar P, Searle P. F. Dilated heart failure in transgenic mice expression the Epstein-Barr virus nuclear antigen-leader protein. J Gen Virol (1993) 74:1381-1391.
[0458] Chalifour L. E, Gomes M. L, Wang N. S, Mes Masson A. M. Polyomavirus large T-antigen expression in heart of transgenic mice causes cardiomyopathy. Oncogene (1990) 5:1719-1726.
[0459] Gruver C. L, DeMayo F, Goldstein M. A, Means A. R. Targeted developmental overexpression of calmodulin induces proliferative and hypertrophic growth of cardiomyocytes in trangenic mice. Endocrinology (1993) 133:376-388.
[0460] Edwards J. G, Lyons G. E, Micales B. K, Malhotra A, Factor S, Leinwand L. A. Cardiomyopathy in trangenic myf5 mice. Circ Res (1996) 78:379-387.
[0461] Iwase M, Uechi M, Vatner D. E, et al. Cardiomyopathy induced by cardiac Gs alpha overexpression. Am J Phys (1997) 272:H585-H589.
[0462] Milano C. A, Dolber P. C, Rockman H. A, et al. Myocardial expression of a constitutively active α1b-adrenergic receptor in trangenic mice induces cardiac hypertrophy. Proc Natl Acad Sci USA (1994) 91:10109-10113.
[0463] Hunter J. J, Tanaka N, Rockman H. A, Ross J, Chien K. R. Ventricular expression of a MLC-2v-ras fusion gene induces cardiac hypertrophy and selective diastolic dysfunction in transgenic mice. J Biol Chem (1995) 270:23173-23178.
[0464] Hirota H, Yoshida K, Kishimoto T, Taga T. Continuous activation of gp130, a signal-retransducing receptor component for interleukin 6-related cytokines, cause myocardial hypertrophy in mice. Proc Natl Acad Sci USA (1995) 92:4862-4866.
[0465] Hassankhani A, Steinhelper M. E, Soonpaa M. H, et al. Overexpression of NGF within the heart of transgenic mice causes hyperinnervation, cardiac enlargement, and hyperplasia of ectopic cells. Dev Biol (1995) 169:309-321.
[0466] Reiss K, Cheng W, Ferber A, et al. Overexpression of IGF-1 in the heart is coupled with myocyte proliferation in transgenic mice. Circulation (1995) 92(Suppl I):370.
[0467] Rockman H. A, Hamilton R, Rahman N. U, et al. Dampened cardiac function in vivo in transgenic mice overexpression GRK5, a G protein-coupled receptor kinase. Circulation (1995) 92(Suppl I):240.
[0468] Bertin B, Mansier P, Makeh I, et al. Specific atrial over-expression of G protein coupled human β₁-adrenoceptors in transgenic mice. Cardiovasc Res (1993) 27:1606-1612.
[0469] Langheinrich M, Lee M. A, Bohm M, et al. The hypertensive Ren-2 transgenic rat TGR (mREN2)27 in hypertension research. Characteristics and functional aspects. Am J Hypertens (1996) 9:506-512.
[0470] Geisterfer-Lowrance A. A. T, Christe M, Conner D. A, et al. A mouse model of familial hypertrophic cardiomyopathy. Science (1996) 272:731-734.
[0471] Welikson R. E, Vikstrom K. L, Factor S. M, Weinberger H. D, Leinwand L. A. Heavy chains lacking the light chain binding domain cause genetically dominant cardiomyopathy in mice. Circulation (1997) 96(Suppl I):571.
[0472] Arber S, Hunter J. J, Ross J Jr., et al. MLP-deficient mice exhibit a disruption of cardiac cytoarchitectural organization, dilated cardiomyopathy, and heart failure. Cell (1997) 88:393-403.
[0473] Graham B. H, Waymire K. G, Cottrell B, et al. A mouse model for mitochondrial myopathy and cardiomyopathy resulting from a deficiency in the heart/muscle isoform of the adenine nucleotide translocator. Nat Genet (1997) 16:226-234.
[0474] Shull M. M, Ormsby I, Kier A. B, et al. Targeted disruption of the mouse tranforming growth factor-β1 gene results in multifocal inflammatory disease. Nature (1992) 359:693-699.
[0475] Aitken K, Penninger J, Mak T, et al. Increased susceptibility to coxsackie viral myocarditis in IRF-1 transgenic knockout mice. Circulation (1994) 90(Suppl I):139.

### B. NABTs for the Treatment of Vascular Disorders

[0476] Atherosclerosis is a condition in which vascular smooth muscle cells are pathologically reprogrammed. Fatty material collects in the walls of arteries and there is typically chronic inflammation. This leads to a situation where the vascular wall thickens, hardens, forms plaques, which may eventually block the arteries or promote the blockage of arteries by promoting clotting. The latter becomes much more prevalent when there is a plaque rupture.

[0477] If the coronary arteries become narrow due to the effects of the plaque formation, blood flow to the heart can slow down or stop, causing chest pain (stable angina), shortness of breath, heart attack, and other symptoms. Pieces of plaque can break apart and move through the bloodstream. This is a common cause of heart attack and stroke. If the clot moves into the heart, lungs, or brain, it can cause a stroke, heart attack, or pulmonary embolism.

[0478] Risk factors for atherosclerosis include: diabetes, high blood pressure, high cholesterol, high-fat diet, obesity, personal or family history of heart disease and smoking. The following conditions have also been linked to atherosclerosis: cerebrovascular disease, kidney disease involving dialysis and peripheral vascular disease. Down modulation of a variety of genes can have a beneficial therapeutic effect for the treatment of artherosclerosis and associated pathologies. These are listed in Table 11 and include, without limitation, androgen receptor, c-myb, DB-1, DP-1, E2F-1, ERG-1, FLT-4, ICH-1L, ISGF3, NF-IL6, OCT-1, p53, Sp-1, PDEGF, and PDGFR. WO/2007/030556 provides an animal model for assessing the effects of modified NABTs directed to the aforementioned targets on the formation of atherosclerotic lesions. NABTs targeting the genes listed above will be prepared with modified backbones, as described elsewhere.

[0479] Atherosclerotic plaque rupture is the main cause of coronary thrombosis and myocardial infarcts. Rekhter et al. have developed a rabbit model in which an atherosclerotic plaque can be ruptured at will after an inflatable balloon becomes embedded into the plaque. Furthermore, the pressure needed to inflate the plaque-covered balloon may be an index of overall plaque mechanical strength (Circulation Research. 1998; 83:705-713). The thoracic aorta of hypercholesterolemic rabbits underwent mechanical removal of endothelial cells, and then a specially designed balloon catheter was introduced into the lumen of the thoracic aorta. As early as 1 month after catheter placement, atherosclerotic plaque formed around the indwelling balloon. The plaques were reminiscent of human atherosclerotic lesions, in terms of cellular composition, patterns of lipid accumulation, and growth characteristics. Intraplaque balloons were inflated both ex vivo and in vivo, leading to plaque fissuring. The ex vivo strategy is designed to measure the mechanical strength of the surrounding plaque, while the in vivo scenario permits an analysis of the plaque rupture consequences, eg, thrombosis. This model can be used to advantage for assessing local delivery of the NABTs described herein into the plaque in order to assess the effects of the same on plaque instability.

### Example 2

### Brain Cell Directed NABTs and Methods of Use Thereof for the Treatment of Alzheimer's Disease and Other Neurological Disorders

### A. Alzheimer's Disease

[0480] NABTs directed to particular targets in neurological cells have efficacy for the treatment of Alzheimer's Disease and other neurological disorders. Suitable targets for treatment of Alzheimer's Disease include without limitation, apolipoprotein epsilon 4, β amyloid precursor protein, CDK-2, Cox-2, CREB, CREBP, Cyclin B, ICH-1L (also known as caspase 2L), PKC genes, PDGFR, SGP2, SRF, and TRPM-2

[0481] The amyloid hypothesis postulates that Alzheimer's Disease is caused by aberrant production or clearance of the amyloid β (Aβ) peptide from the brains of affected individuals. Aβ is toxic to neurons and forms plaques in the brains of Alzheimer's Disease patients. These plaques constitute one of the hallmark pathologies of the disease. Aβ is produced by the consecutive proteolytic cleavage of the Amyloid Precursor Protein (APP) by β-secretase (BACE) and γ-secretase proteases. APP is also cleaved by α-secretase but this process generates non-amyloidogenic products. Cleavage by γ-secretase generates Aβ peptides of variable lengths. The 42 amino acid form of Aβ (Aβ1-42) is known to be the most toxic.

[0482] The NABTs of the invention can be incubated with a neuronal cell line, e.g., ELLIN a human neuroblastoma cell line which produces detectable levels of Aβ. The effect of the NABT on Aβ production can be readily determined using conventional biochemical methods. This cell line is suitable for characterizing the NABTs of the invention which modulate endogenous AP production. The cells are deposited at the ECACC under depositor reference ELLIN as cell line BE(2)-C. BE(2)-C (ECACC #95011817) is a clonal sub-line of SK-N-BE(2) (ECCAC #95011815) which was isolated from bone marrow of an individual with disseminated neuroblastoma in 1972. They are reported to be multipotential with regard to neuronal enzyme expression and display a high capacity to convert tyrosine to dopamine. The cells show a small, refractile morphology with short, neurite-like cell processes and tend to grow in aggregates. See WO/2008/084254 entitled “Cell line for Alzheimers's disease therapy screening” which is incorporated herein by reference.

[0483] Also suitable for screening are clonal cell lines derived by fusion of dorsal root ganglia neurons with neuroblastoma cells as described in Platika et al., PNAS (1985) 82:3499-3503. These cells have been immortalized and retain their neuronal phenotype and thus also have utility for screening the nucleic acid based therapeutics of the invention for their ability to modulate neuronal structure and function.

[0484] The table below provides art recognized rodent models for optimizing modifications of the NABTs described herein for the treatment and/or prevention of Alzheimer's Disease. Methods for assessing: 1) the formation of abnormal plaques in the brain; 2) neuronal loss, and 3) the development of diminished cognitive function and memory loss are readily assessed in animal models described in the cited references.

[0485] As set forth in Spires et al. (2005) NeuroRx 2: 423-437), Games and colleagues (Nature 373: 523-527, 1995) reported a convincing mouse model of AD, the PDAPP mouse, in 1995. PDAPP mice overexpress human APP cDNA with portions of APP introns 6-8 and with valine at residue 717 substituted by phenalalanine—one of the FAD-associated mutations—under the control of a platelet-derived growth factor β (PDGFβ) promoter. These mice, unlike the earlier APP models controlled by an NSE promoter, express very high levels of APP protein (˜10-fold higher than endogenous APP), and they develop more Alzheimer-like neuropathology, including extracellular diffuse and neuritic plaques, dystrophic neurites, gliosis, and loss of synapse density. Notably, plaque formation in these mice proceeds from the hippocampus (at 6-8 months) to cortical and limbic areas (8 months) in a progressive manner showing regional specificity like that seen in AD pathology. Furthermore, amyloid burden and memory impairment assessed using a modified Morris water maze task increase with aging. The amyloid pathology in PDAPP mice is strikingly similar to that observed in AD. Ultrastructural comparisons reveal similar amyloid fibril size, similar plaque-associated dystrophic neurites containing synaptic components and neurofibrils, association of microglia with plaques, and phosphorylation of neurofilaments and tau protein in neurites in aged mice (18 months). However, these neurodegenerative alterations are not accompanied by paired-helical filament formation, and stereological analysis by Irizarry et al. revealed no global neuronal loss in the entorhinal cortex, CA1, or cingulate cortex through 18 months of age. Loss of neurons in the immediate vicinity of dense-cored plaques, however, was observed mimicking observations in human AD.

[0486] In 1996, Hsiao et al. published another APP overexpressing mouse model of AD, the Tg2576 line (Science 274: 99-102, 1996). These mice are transgenic for human APP cDNA with the double Swedish mutation (K670N and M671 L) under the control of the hamster prion protein promoter (PrP). Heterozygous Tg2576 mice produce APP at 5.5-fold over endogenous levels and develop diffuse and neuritic plaques in the hippocampus, cortex, subiculum, and cerebellum at around 9-11 months of age similar to those seen in AD and PDAPP mice. In spontaneous alternation and water maze tasks, Tg2576 mice show subtle age-related memory deficits starting at around 8 months of age. They also have an age-dependent electrophysiological phenotype at older ages characterized by impaired induction of LTP in the hippocampus in vitro and in vivo. In cortex, synaptic integration is also disrupted in vivo. These functional disruptions may underlie some of the observed memory deficits. Plaques in Tg2576 mice are associated with dystrophic neurites and gliosis, but without global loss of synapses or neurons in CA1.

[0487] Lanz et al. reported that dendritic spine density decreases in CA1 of both PDAPP and Tg2567 mice before plaque deposition, demonstrating that these models both emulate some of the disrupted synaptic circuitry seen in AD (Neurobiol Dis 13: 246-253, 2003). APP23 mice, developed at Novartis, overexpress human APP cDNA with the Swedish mutation under control of the murine Thy1.2 promoter. These mice develop both amyloid plaques and cerebral amyloid angiopathy starting at around 6 months of age. Similarly to the previously described models, APP23 mice develop memory deficits as assessed by behavioral tests. Unlike the PDAPP and Tg2576 lines, neuron loss of 14% was reported in the CA1 of the APP23 mice, although no loss was detected in the cortex.

[0488] Another APP overexpressing mouse line with the Swedish mutation, developed by Borchelt et al. does not develop plaques until 18 months (line APP Swe C3-3) (Neuron 19: 939-945, 1997). The transgene is driven by a different promoter (mouse prion promoter) and is on a different background strain (C57BL/6-C3H) from the Tg2576 and APP23 models mentioned above that have earlier onset of amyloid deposition. Expression of both the Swedish mutation and the V717F mutation driven by the Syrian hamster prion promoter (TgCRND8 mouse model) causes early deposition of amyloid in plaques and premature death dependent on background strain, indicating the importance of genetic background on the effects of APP overexpression. TgCRND8 mice also perform poorly in the water maze indicating memory deficits.

[0489] Several different animal models for assessing modifications to the NABTs described herein are provided in the table below.

| | | | Neuro- | | | | | | | |
|---|---|---|---|---|---|---|---|---|---|---|
| | Gene(s) | | pathology | P- | | Cell | Memory | Age of Onset | | |
| Name | Overexpressed | Promoter | Plaques | tau | NFT | Loss | Deficits | (of Pathology) | | Ref. |
| PDAPP mice | APP minigene, V717F | PDGFβ | Yes | Yes | No | No | Yes | 6-8 | months | Games D, et al. (1995); |
| | mutation | | | | | | | | | Masliah E, et al.(1996); |
| | | | | | | | | | | Irizarry M C, (1997); |
| | | | | | | | | | | Chen G, et al. (2000). |
| Tg2576 mice | APP Swe cDNA (695) | Hamster PrP | Yes | Yes | No | No | Yes | 9-11 | Months | Hsiao K, et al (1996); |
| | | | | | | | | | | Irizarry M C, et al. |
| | | | | | | | | | | (1997); Lanz T A, et al. |
| | | | | | | | | | | (2003). |
| APP23 mice | APP Swe cDNA (751) | Murine Thy1 | Yes | Yes | No | Yes | Yes | 6 | Months | Sturchler-Pierrat C, et |
| | | | | | | (CA1) | | | | al. (1997); Calhoun M E, |
| | | | | | | | | | | et al. (1998). |
| TgCRND8 mice | APP cDNA Swe and | Syrian hamster | Yes | Nr | No | nr | Yes | 3 | Months | Dudal S, et al. (2004); |
| | V717F mutations | PrP | | | | | | | | Chishti M A, et al. |
| | | | | | | | | | | (2001). |
| APPSwe | APP cDNA (695) Swe | Murine PrP | Yes | Nr | Nr | nr | nr | 18 | Months | Borchelt D R, et al. |
| TgC3-3 mice | | | | | | | | | | (1997); Borchelt D R, et |
| | | | | | | | | | | al. (1996). |
| PSAPP mice | Tg2576 and PSI M146L | Hamster PrP, | Yes | Yes | Nr | Minor | Yes | 6 | Months | Holcomb L, et al. |
| | | PDGFβ | | | | | | | | (1998); Holcomb L A, et |
| | | | | | | | | | | al. (1999). |
| Tg478/1116/ | APP Swe, APP Swe and | Rat synapsin 1, | Yes | Nr | Nr | nr | nr | 9 | Months | Flood D G, et al. (2003). |
| 11587 rat | V717F, PS1, M146V | PDGFβ, Rat | | | | | | | | |
| | | synapsin I | | | | | | | | |
| ALZ7 mice | 4R tau | Human Thy1 | No | Yes | No | No | nr | — | | Gotz J, et al. (1995). |
| ALZ17 mice | 4R tau | Murine Thy1 | No | Yes | No | No | nr | — | | Probst A, et al. (2000). |
| 7TauTg mice | 3R tau | Murine PrP | No | Yes | Yes | nr | nr | 18-20 | Months | Ishihara T, et al. (2001). |
| JNPL3 mice | 4R tau P301L | Murine PrP | No | Yes | Yes | Yes | Yes | 5 | Months | Lewis J, et al. (2000); |
| | | | | | | | | | | Arendash G W, et al. |
| | | | | | | | | | | (2004). |
| pR5 mice | 4R tau P301L | Murine Thy1 | No | Yes | Yes | Yes | nr | 8 | Months | Gotz J, et al. (2001). |
| TAPP mice | Tg2576x JNPL3 | Hamster PrP, | Yes | Yes | Yes | nr | nr | 6 | Months | Lewis J, et al. (2001). |
| | | Murine PrP | | | | | | | | |
| 3xTg-AD | APP (Swe), PS1 | Murine Thy1 | Yes | Yes | Yes | nr | nr | 3 | Months | Oddo S, et al. (2003); |

| | | |
|---|---|---|
| (M146V), tau (P301L) | (PS1 knockin) | Oddo S, et al. (2003). |

nr = not reported;
Swe = Swedish mutation;
P-tau = 32 phosphorylated tau immunoreactivity.
NeuroRx. 2005

[0490] Games D, Adams D, Alessandrini R, Barbour R, Berthelette P, Blackwell C, et al. Alzheimer-type neuropathology in transgenic mice overexpressing V717F β-amyloid precursor protein. Nature 373: 523-527, 1995
[0491] Masliah E, Sisk A, Mallory M, Mucke L, Schenk D, Games D. Comparison of neurodegenerative pathology in transgenic mice overexpressing V717F β-amyloid precursor protein and Alzheimer's disease. J Neurosci 16: 5795-5811, 1996.
[0492] Irizarry M C, Soriano F, McNamara M, Page K J, Schenk D, Games D, et al. Aβ deposition is associated with neuropil changes, but not with overt neuronal loss in the human amyloid precursor protein V717F (PDAPP) transgenic mouse. J Neurosci 17: 7053-7059, 1997.
[0493] Chen G, Chen K S, Knox J, Inglis J, Bernard A, Martin S J, et al. A learning deficit related to age and β-amyloid plaques in a mouse model of Alzheimer's disease. Nature 408: 975-979, 2000.
[0494] Hsiao K, Chapman P, Nilsen S, Eckman C, Harigaya Y, Younkin S, et al. Correlative memory deficits, Aβ elevation, and amyloid plaques in transgenic mice. Science 274: 99-102, 1996.
[0495] Irizarry M C, McNamara M, Fedorchak K, Hsiao K, Hyman B T. APPSw transgenic mice develop age-related A β deposits and neuropil abnormalities, but no neuronal loss in CA1. J Neuropathol Exp Neurol 56: 965-973, 1997.
[0496] Lanz T A, Carter D B, Merchant K M. Dendritic spine loss in the hippocampus of young PDAPP and Tg2576 mice and its prevention by the ApoE2 genotype. Neurobiol Dis 13: 246-253, 2003.
[0497] Sturchler-Pierrat C, Abramowski D, Duke M, Wiederhold K H, Mistl C, Rothacher S, et al. Two amyloid precursor protein transgenic mouse models with Alzheimer disease-like pathology. Proc Natl Acad Sci USA 94: 13287-13292, 1997.
[0498] Calhoun M E, Wiederhold K H, Abramowski D, Phinney A L, Probst A, Sturchler-Pierrat C, et al. Neuron loss in APP transgenic mice. Nature 395: 755-756, 1998.
[0499] Borchelt D R, Ratovitski T, van Lare J, Lee M K, Gonzales V, Jenkins N A, et al. Accelerated amyloid deposition in the brains of transgenic mice coexpressing mutant presenilin 1 and amyloid precursor proteins. Neuron 19: 939-945, 1997.
[0500] Borchelt D R, Thinakaran G, Eckman C B, Lee M K, Davenport F, Ratovitsky T, et al. Familial Alzheimer's disease-linked presenilin 1 variants elevate Aβ1-42/1-40 ratio in vitro and in vivo. Neuron 17: 1005-1013, 1996.
[0501] Dudal S, Krzywkowski P, Paquette J, Morissette C, Lacombe D, Tremblay P, et al. Inflammation occurs early during the Aβ deposition process in TgCRND8 mice. Neurobiol Aging 25: 861-871, 2004.
[0502] Chishti M A, Yang D S, Janus C, Phinney A L, Horne P, Pearson J, et al. Early-onset amyloid deposition and cognitive deficits in transgenic mice expressing a double mutant form of amyloid precursor protein 695. J Biol Chem 276: 21562-21570, 2001.
[0503] Holcomb L, Gordon M N, McGowan E, Yu X, Benkovic S, Jantzen P, et al. Accelerated Alzheimer-type phenotype in transgenic mice carrying both mutant amyloid precursor protein and presenilin 1 transgenes. Nat Med 4: 97-100, 1998.
[0504] Holcomb L A, Gordon M N, Jantzen P, Hsiao K, Duff K, Morgan D. Behavioral changes in transgenic mice expressing both amyloid precursor protein and presenilin-1 mutations: lack of association with amyloid deposits. Behav Genet. 29: 177-185, 1999.
[0505] Flood D G, Howland D S, Lin Y-G, Ciallella J R, Trusko S P, Scott R W, Savage M S. Aβ deposition in a transgenic rat model of Alzheimer's disease. Poster 842.22 presented at Society for Neuroscience meeting, New Orleans, La., 2003.
[0506] Gotz J, Probst A, Spillantini M G, Schafer T, Jakes R, Burki K, et al. Somatodendritic localization and hyperphosphorylation of tau protein in transgenic mice expressing the longest human brain tau isoform. EMBO J 14: 1304-1313, 1995.
[0507] Probst A, Gotz J, Wiederhold K H, Tolnay M, Mistl C, Jaton A L, et al. Axonopathy and amyotrophy in mice transgenic for human four-repeat tau protein. Acta Neuropathol (Berl) 99: 469-481, 2000.
[0508] Ishihara T, Zhang B, Higuchi M, Yoshiyama Y, Trojanowski J Q, Lee V M. Age-dependent induction of congophilic neurofibrillary tau inclusions in tau transgenic mice. Am J Pathol 158: 555-562, 2001.
[0509] Lewis J, McGowan E, Rockwood J, Melrose H, Nacharaju P, Van Slegtenhorst M, et al. Neurofibrillary tangles, amyotrophy and progressive motor disturbance in mice expressing mutant (P301L) tau protein. Nat Genet. 25: 402-405, 2000.
[0510] Arendash G W, Lewis J, Leighty R E, McGowan E, Cracchiolo J R, Hutton M, et al. Multi-metric behavioral comparison of APPsw and P301L models for Alzheimer's disease: linkage of poorer cognitive performance to tau pathology in forebrain. Brain Res 1012: 29-41, 2004.
[0511] Gotz J, Chen F, Barmettler R, Nitsch R M. Tau filament formation in transgenic mice expressing P301L tau. J Biol Chem 276: 529-534, 2001.
[0512] Lewis J, Dickson D W, Lin W L, Chisholm L, Corral A, Jones G, et al. Enhanced neurofibrillary degeneration in transgenic mice expressing mutant tau and APP. Science 293: 1487-1491, 2001.
[0513] Oddo S, Caccamo A, Shepherd J D, Murphy M P, Golde T E, Kayed R, et al. Triple-transgenic model of Alzheimer's disease with plaques and tangles: intracellular AP and synaptic dysfunction. Neuron 39: 409-421, 2003
[0514] Oddo S, Caccamo A, Kitazawa M, Tseng B P, LaFerla F M. Amyloid deposition precedes tangle formation in a triple transgenic model of Alzheimer's disease. Neurobiol Aging 24: 1063-1070, 2003.

### B. Multiple Sclerosis

[0515] Multiple sclerosis (abbreviated MS, also known as disseminated sclerosis or encephalomyelitis disseminata) is an autoimmune condition characterized by demyelination. Disease onset usually occurs in young adults, and it is more common in females. It has a prevalence that ranges between 2 and 150 per 100,000. MS was first described in 1868 by Jean-Martin Charcot.

[0516] MS affects the ability of nerve cells in the brain and spinal cord to communicate with each other. Nerve cells communicate by sending electrical signals called action potentials down long fibers called axons, which are wrapped in an insulating substance called myelin. When myelin is lost, the axons can no longer effectively conduct signals. The name multiple sclerosis refers to scars (scleroses—better known as plaques or lesions) in the white matter of the brain and spinal cord, which is mainly composed of myelin. Although much is known about the mechanisms involved in the disease process, the cause remains unknown. Theories include genetics or infections. Different environmental risk factors have also been found.

[0517] Almost any neurological symptom can appear with the disease which often progresses to physical and cognitive disability. MS takes several forms, with new symptoms occurring either in discrete attacks (relapsing forms) or slowly accumulating over time (progressive forms). Between attacks, symptoms may go away completely, but permanent neurological problems often occur, especially as the disease advances.

[0518] There is no known cure for MS. Existing treatments attempt to return function after an attack, prevent new attacks, and prevent disability. MS medications can have adverse effects or be poorly tolerated, and many patients pursue alternative treatments, despite the lack of supporting scientific study. The prognosis is difficult to predict; it depends on the subtype of the disease, the individual patient's disease characteristics, the initial symptoms and the degree of disability the person experiences as time advances. Life expectancy of patients is nearly the same as that of the unaffected population, nonetheless, improved therapeutic agents for the treatment of multiple sclerosis are urgently needed. Several of the NABTs of the invention target molecules which are causally implicated in MS. These include, without limitation, COX-2, p53, TNF-α, and TNF-β. Accordingly, administration of NABTs targeting such molecules should exhibit beneficial therapeutic effects to patients in need of such treatment. In a preferred embodiment, NABTs which inhibit p53 expression can be delivered nasally to reduce the pathological symptoms associated with MS.

[0519] U.S. Pat. No. 7,423,194 provides an animal model and cells suitable for assessing the effect of modified NABTs described herein on demyelination.

[0520] Different models of experimental autoimmune encephalomyelitis (EAE) have also been successfully applied to investigate aspects of the autoimmune pathogenesis of multiple sclerosis. See Wekerle et al. Annals of Neurology (2004) 36: (S1), S47-S53). Studies using myelin-specific T-cell lines that transfer EAE to naive recipient animals established that only activated lymphocytes are able to cross the endothelial blood-brain barrier and cause autoimmune disease within the local parenchyma. All encephalitogenic T cells are CD4⁺ Th1-type lymphocytes that recognize autoantigenic peptides in the context of MHC class II molecules. In the case of myelin basic protein (MBP) specific EAE in the Lewis rat, the T-cell response is directed against one strongly dominant peptide epitope. The encephalitogenic T cells preferentially use one particular set of T-cell receptor genes. Although MBP is a strong encephalitogen in many species, a number of other brain proteins are now known to induce EAE. These include mainly myelin components (PLP, MAG, and MOG), but also, the astroglial S-100β protein. Encephalitogenic T cells produce only inflammatory changes in the central nervous system, without extensive primary demyelination. Destruction of myelin and oligodendrocytes in these models requires additional effector mechanisms such as auto-antibodies binding to myelin surface antigens such as the myelin-oligodendrocyte glycoprotein. This animal model may also be used to advantage to assess the effects of the NABTs described above on demyelination processes.

### C. Parkinson's Disease

[0521] Parkinson's disease is a chronic, progressive neurodegenerative movement disorder. Tremors, rigidity, slow movement (bradykinesia), poor balance, and difficulty walking (called parkinsonian gait) are characteristic primary symptoms of Parkinson's disease. Parkinson's disease afflicts 1 to 1½ million people in the United States. The disorder occurs in all races but is somewhat more prevalent among Caucasians. Men are affected slightly more often than women. Symptoms of Parkinson's disease may appear at any age, but the average age of onset is 60. It is rare in people younger than 30 and risk increases with age. It is estimated that 5% to 10% of patients experience symptoms before the age of 40. Parkinson's disease is common in the elderly and one in 20 people over the age of 80 has the condition.

[0522] Parkinson's results from the degeneration a number of nuclei in the dopamine-producing nerve cells in the brainstem. Most attention has been given to the substantia nigra and the locus coeruleus. Dopamine is a neurotransmitter that stimulates motor neurons, those nerve cells that control the muscles. When dopamine production is depleted, the motor system nerves are unable to control movement and coordination. Parkinson's Disease (PD) patients have lost 80% or more of their dopamine-producing cells by the time symptoms appear.

[0523] Clearly, there is an urgent need for new and improved therapeutic agents for the treatment of Parkinson's disease. Such a need is met by the NABTs specific for several gene targets relevant for the treatment of Parkinson's Disease described herein. These include, without limitation, COX-2, FAS/APO-1, p53, and PKC gamma.

[0524] Teismann et al. have shown that COX-2 for example, the rate-limiting enzyme in prostaglandin E₂ synthesis, is up-regulated in brain dopaminergic neurons of both PD and MPTP mice (PNAS (2003) 100:5473-5478. COX-2 induction occurs through a JNK/c-Jun-dependent mechanism after MPTP administration. Targeting COX-2 does not protect against MPTP-induced dopaminergic neurodegeneration by mitigating inflammation. Evidence is provided showing COX-2 inhibition prevents the formation of the oxidant species dopamine-quinone, which has been implicated in the pathogenesis of PD. This study supports a critical role for COX-2 in both the pathogenesis and selectivity of the PD neurodegenerative process. There are safety concerns connected to the use of certain currently available COX-2 inhibitors. NABTs directed to COX-2 should have efficacy for the treatment of this disorder. NABTs modified to include a carrier which improves their capacity to penetrate the blood brain barrier as described herein can be useful therapeutics for the treatment of PD. Such NABTs can be further characterized in any of the current models for PD (e.g. the reserpine model, neuroleptic-induced catalepsy, tremor models, experimentally-induced degeneration of nigro-striatal dopaminergic neurons with 6-OHDA, methamphetamine, MPTP, MPP⁺, tetrahydroisoquinolines, β-carbolines, and iron) as described by Gerlach et al. J. of Neural Transmission 103:987:1041.

[0525] Programmed cell death plays an important role in the neuronal degeneration after cerebral ischemia, but the underlying mechanisms are not fully understood. Martin-Villalba et al. examined, in vivo and in vitro, whether ischemia-induced neuronal death involves death-inducing ligand/receptor systems such as CD95 (Fas-L/APO-1L) and tumor necrosis factor-related apoptosis-inducing ligand (TRAIL). After reversible middle cerebral artery occlusion in adult rats, both CD95 ligand and TRAIL were expressed in the apoptotic areas of the postischemic brain. Further recombinant CD95 ligand and TRAIL proteins induced apoptosis in primary neurons and neuron-like cells in vitro. The immunosuppressant FK506, which protects cells against ischemic neurodegeneration, prevented post-ischemic expression of these death-inducing ligands both in vivo and in vitro. FK506 also abolished phosphorylation, but not expression, of the c-Jun transcription factor involved in the transcriptional control of CD95 ligand. Most importantly, in 1pr mice expressing dysfunctional CD95, reversible middle cerebral artery occlusion resulted in infarct volumes significantly smaller than those found in wild-type animals. These results suggest an involvement of CD95 ligand and TRAIL in the pathophysiology of postischemic neurodegeneration and offer alternative strategies for the treatment of cardiovascular brain disease. See Martin Villaba et al. (1999) J. of Neuroscience 19:3809-3817.

[0526] Thus, NABTs which selectively down modulate FAS/APO-1 provided herein should have efficacy for the treatment of disorders associated with aberrant neuronal cell apoptosis, such as Parkinson's Disease, Alzheimer's Disease, Huntingon's disease etc. Such NABTs can be assessed in the various cell line and animal models described in the present example.

[0527] p53, Bax and Bcl-X_{L} proteins have been implicated in apoptotic neuronal cell death. Blum et al. investigated whether those proteins are involved in 6-OHDA-induced PC12 cell death. After a 24-h exposure to the neurotoxin (100 μM), morphological evidence for apoptosis was observed in PC12 cells. Up-regulation of p53 and Bax proteins was demonstrated 4 and 6 h, respectively, after 6-OHDA treatment; in contrast, no change in Bcl-X_{L}, levels was found. These findings suggest that p53 provides a relevant marker of neuronal apoptosis as previously described in kainic acid- or ischemia-induced neuronal cell death and may participate to neuronal degeneration in Parkinson's Disease. Brain Research (1997) 751:139-142. This model system is also useful for assessing the efficacy of the p53 directed NABTs and modifications thereto as described above for the treatment of Huntington's disease.

### Example 3

### Anti-Cancer NABTs and Methods of Use Thereof for the Treatment of Neoplastic and Hyper-Proliferative Diseases

### A. Anti-Cancer NABTs and Methods of Use Thereof.

[0528] Cellular transformation during the development of cancer involves multiple alterations in the normal pattern of cell growth regulation and dysregulated transcriptional control. Primary events in the process of carcinogenesis can involve the activation of oncogene function by some means (e.g., amplification, mutation, chromosomal rearrangement) or altered or aberrant expression of transcriptional regulator functions, and in many cases the removal of anti-oncogene function. One reason for the enhanced growth and invasive properties of some tumors may be the acquisition of increasing numbers of mutations in oncogenes and anti-oncogenes, with cumulative effect (Bear et al., Proc. Natl. Acad. Sci. USA 86:7495-7499, 1989). Alternatively, insofar as oncogenes function through the normal cellular signalling pathways required for organismal growth and cellular function (reviewed in McCormick, Nature 363:15-16, 1993), additional events corresponding to mutations or deregulation in the oncogenic signalling pathways may also contribute to tumor malignancy (Gilks et al., Mol. Cell. Biol. 13:1759-1768, 1993), even though mutations in the signalling pathways alone may not cause cancer.

[0529] A variety of molecular targets exist for the development of efficacious anti-cancer agents, these include, without limitation, 5 alpha reductase, A-myb, ATF-3, B-myb, β-amyloid precursor protein, BSAP (also known as (Pax5), C/EBP, c-fos, c-jun, c-myb, c-myc, CDK-1 (also known as p34, cdc2), CDK-2, CDK-3, CDK-4, CDK-4 inhibitor (Arf), cHF.10 (also known of ZNF35, HF 10), COX-2, CREB, CREBP1 (also known as ATF-2), Cyclins A, B, D1, D2, D3, DB-1 (also known as ZNF161, VEZF1), DP-1, E12, E2A, E2F-1 (RBAP-1) E2F-2, E47, ELK-1, Epidermal Growth Factor Receptor, ERM, (ETV5), estrogen receptor, ERG-1, ERK-1, ERK3, ERK subunit A, ERK subunit B, Ets-1, Ets-2, FAS/APO-1, FLT-1 also known as VEGFR-1), FLT-4 (also known as VEGFR-3), Fra-1, Fra-2, GADD-45, GATA-2, GATA-3, GATA-4, HB9 (also known as MNX-1, HLSB9), HB24 (also known as HLX-1), h-plk (also known as ERV3), Hox1.3 (also known as HoxA5), Hox 2.3, (also known as HoxB7), Hox2.5 (also known as HoxB9), Hox4A (also known as HoxD3) Hox 4D (also known as HoxD10) Hox 7 (also known as MSX-1) HoxA1, HoxA10, HoxC6, HS1 (also known as 14-3-3 beta/alpha), HTF4a (also known as TCF12; HEB), I-Rel (also known as RelB), ICE (also known as CASP1; Caspase-1), ICH-1L (also known as CASP2L; Caspase-2L), ICH-1S (also known as CASP2S; Caspase-2S), ID-1, ID-2, ID-3, IRF-1, IRF-2, ISGF3, (also known as Stat1), junB, junD, KDR/FLK-1, (also known as VEGFR-2), L-myc, Ly1-1, MAD-1 (also known as MXD-1; MAD), MAD-3 (also known as NFkB1A, NFKB1, IKBA IkappaBalpha), MADS/MEF-2 (also known as MEF-2C), MAX, Mcl-1, MDR-1, MRP, MSX-2, mts1 (also known as S00A4), MXi1, MZF-1, NET (also known as ELK3; ERP), NF-IL6 (also known as C/EBPbeta; (also known as CEBPB), NF-IL6 beta (also known as C/EBPdelta, CEBPD), NF-kappa B (including 51 kD, 65kD and A subunits and intron 15), N-myc, OCT-1 (also known as POU2F1, NF-AI; OTF-1), OCT-2, OCT-3, Oct-T1, OCT-T2, OTF-3C, OZF, p53, p107, PDEGF, PDGFR, PES, Pim-1, PKC-alpha, PKC-beta, PKC-delta, PKC-epsilon, PKC-iota, Ref-1, REL (c-Rel), SAP-1, SCL (Also known as AL-1, TCL5, Stem cell protein), SGP-2 (Also known as clusterin, CLU, TRPM-2, Apolipoprotein J; APOJ, Complement associated protein SP 40,40, Complement cytolysis inhibitor, KUB1; CL1, testosterone-repressed prostate message 2), Sp-1, Sp-3, Sp-4, Spi-B (also known as PU.1 related), SRF, TGF-beta (also known as TGF beta 1, TGFB1 and TGFB), TR4, VEGF, Waf-1 (also known as p21, CAP20, CDKN1, CIP1, MDA6), WY-1 and YY-1. Of these the most preferred NABT target for cancer in general is p53. Most anticancer NABTs will provide a superior therapeutic effect when they are combined with one or more therapeutic agents that promote apoptosis. The latter includes but is not limited to conventional chemotherapy, radiation and biologic agent such as monoclonal antibodies and agents that manipulate hormone pathways.

[0530] The present invention provides NABTs which are effective to down-regulate expression of the gene products encoded by the aforementioned targets. In order to assess the effects of modifications of such NABTs (e.g., altered backbone configurations, addition of CPP, addition of endosomal lytic components, presence or absence of carriers), cell lines obtained from the cancers listed in Table 11 which are commercially available from the ATCC, can be incubated with the NABT(s) and their effects on target gene expression levels assessed.

[0531] Most cancers of the major organ systems can be excised and cultured in nude mice as xenografts. Additionally, most blood born cancers such as leukemias and lymphomas can be established in mice. Such mice provide superior in vivo models for studying the effects of the anti-cancer agents disclosed herein. The particular cancer types associated with the above-identified targets are provided in Table 11. Creating mice comprising such xenografts is well within the purview of the skilled artisan. Once the tumors are established, the NABTs of the invention, alone or in combination with the agents listed above, will be administered and the effects on reduction of tumor burden, tumor cell morphology, tumor invasive properties, angiogenesis, apoptosis, metastasis, morbidity and mortality will be determined. Alterations to NABT structures can then be assessed to find the most potent forms having efficacy for the treatment of cancer.

### B. NABTs and Methods of Use Thereof for the Treatment of Hyperproliferative Disorders.

[0532] Several hyperproliferative disorders are amenable to treatment with the NABTs described herein. Such disorders include dysplasias (e.g., cervical displasia), psoriasis, benign prostatic hyperplasia, pulmonary fibrosis, myelodysplasias, and ectodermal dysplasia. Table 11 lists targets for the NABTs associated with these disorders. These include, without limitation, 5-alpha reductase, cyclin A, cyclin B, FLT-1, Fra-2, ICE, ID-1, IRF-1, ISGF3, junB, MAD-3, p53, PDEGFR, TGF-β, TNF-α, and VEGF.

[0533] Eferl et al. report that ectopic expression of Fra-2 in transgenic mice in various organs results in generalized fibrosis with predominant manifestation in the lung (Proc Natl Acad Sci 2008 Jul. 29; 105(30):10525-30). The pulmonary phenotype was characterized by vascular remodeling and obliteration of pulmonary arteries, which coincided with expression of osteopontin, an AP-1 target gene involved in vascular remodeling and fibrogenesis. These alterations were followed by inflammation; release of profibrogenic factors, such as IL-4, insulin-like growth factor 1, and CXCL5; progressive fibrosis; and premature mortality. Genetic experiments and bone marrow reconstitutions suggested that fibrosis developed independently of B and T cells and was not mediated by autoimmunity despite the marked inflammation observed in transgenic lungs. Importantly, strong expression of Fra-2 was also observed in human samples of idiopathic and autoimmune-mediated pulmonary fibrosis. These findings indicate that Fra-2 expression is sufficient to cause pulmonary fibrosis in mice, possibly by linking vascular remodeling and fibrogenesis, and indicate that Fra-2 is a contributing pathogenic factor of pulmonary fibrosis in humans. In this embodiment of the invention, it is desirable to deliver the NABTs in an aerosolized formulation as discussed above. Other molecules which are associated with a pathological role in pulmonary fibrosis include PDEGF, PDGFR, and SRF. NABTs which effectively down modulate these targets are provided herein and should demonstrate efficacy for the treatment of pulmonary fibrosis.

[0534] Psoriasis is a chronic disease of unsolved pathogenesis affecting between one and three percent of the general population. It is characterized by inflamed, scaly and frequently disfiguring skin lesions and often accompanied by arthritis of the small joints of the hands and feet.

[0535] Haider et al. have observed increased junB mRNA and protein expression in psoriasis vulgaris lesions. See J. of Investigative Dermatology (2006) 126:912-914. Accordingly, topical administration of NABTs which down modulate expression of junB should have efficacy for the treatment of psoriasis.

[0536] In their article entitled, “Fas Pulls the Trigger on Psoriasis”, Gilhar et al. describe an animal model of psoriasis and the role played by Fas mediated signal transduction (2006) Am. J. Pathology 168:170-175). Fas/FasL signaling is best known for induction of apoptosis. However, there is an alternate pathway of Fas signaling that induces inflammatory cytokines, particularly tumor necrosis factor alpha (TNF-α) and interleukin-8 (IL-8). This pathway is prominent in cells that express high levels of anti-apoptotic molecules such as Bcl-xL. Because TNF-α is central to the pathogenesis of psoriasis and psoriatic epidermis has a low apoptotic index with high expression of Bcl-xL, these authors hypothesized that inflammatory Fas signaling mediates induction of psoriasis by activated lymphocytes. Noninvolved skin from psoriasis patients was grafted to beige-severe combined immunodeficiency mice, and psoriasis was induced by injection of FasL-positive autologous natural killer cells that were activated by IL-2. Induction of psoriasis was inhibited by injection of a blocking anti-Fas (ZB4) or anti-FasL (4A5) antibody on days 3 and 10 after natural killer cell injection. Anti-Fas monoclonal antibody significantly reduced cell proliferation (Ki-67) and epidermal thickness, with inhibition of epidermal expression of TNF-α, IL-15, HLA-DR, and ICAM-1. Fas/FasL signaling is an essential early event in the induction of psoriasis by activated lymphocytes and is necessary for induction of key inflammatory cytokines including TNF-α and IL-15.

[0537] Such data provide the rationale for therapeutic regimens entailing topical administration of NABTs targeting Fas and/or BCL-xL for the treatment and alleviation of symptoms associated with psoriasis.

[0538] p53 protein is an important transcription factor which plays a central role in cell cycle regulation mechanisms and cell proliferation control. Baran et al. performed studies to identify the expression and localization of p53 protein in lesional and non-lesional skin samples taken from psoriatic patients in comparison with healthy controls (Acta Dermatovenerol Alp Panonica Adriat. (2005) 14:79-83). Sections of psoriatic lesional and non-lesional skin (n=18) were examined. A control group (n=10) of healthy volunteers with no personal and family history of psoriasis was also examined. The expression of p53 was demonstrated using the avidin-biotin complex immunoperoxidase method and the monoclonal antibody DO7. The count and localization of cells with stained nuclei was evaluated using a light microscope in 10 fields for every skin biopsy. In lesional psoriatic skin, the count of p53 positive cells was significantly higher than in the skin samples taken from healthy individuals (p<0.01) and non-lesional skin taken from psoriatic patients (p=0.02). No significant difference between non-lesional psoriatic skin and normal skin was observed (p=0.1). A strong positive correlation between mean count and mean percent of p53 positive cells was found (p<0.0001). p53 positive cells were located most commonly in the basal layer of the epidermis of both healthy skin and non-lesional psoriatic skin. In lesional psoriatic skin p53 positive cells were present in all layers of the epidermis. In view of these data, it is clear that p53 protein appears to be an important factor in the pathogenesis of psoriasis. Accordingly, NABTs which effectively down regulate p53 expression in the skin used alone or in combination with other agents used to treat psoriasis should alleviate the symptoms of this painful and unsightly disorder.

[0539] Additional molecules which demonstrate dysregulated or overexpression in psoriatic lesions include for example, cyclins, FLT-1, ICE, ID-1, ISGSF3, and Sp-1. NABTs which effectively down modulate the expression of these targets are also provided in the present invention for use in methods for the treatment and prevention of psoriasis.

[0540] Muto et al. described newly established cervical dysplasia-derived cell lines which may be used to advantage for assessing the effects of the NABTs described herein on cervical multi-step carcinogenesis. NABTs can be added to the culture medium for human cervical dysplasia cell lines, CICCN-2 from cervical intraepithelial neoplasia grade I (CIN I), CICCN-3 from CIN II, and CICCN-4 from CIN III, and human cervical carcinoma-derived cell lines such as CICCN-6, CICCN-18, and HeLa cells and the effects on growth retardation assessed. Chromatin condensations, morphologic evidence for apoptotic cell death, can also be determined.

[0541] Certain of the hyperproliferative diseases described in the present example can be treated using transdermal drug delivery systems. Exemplary transdermal delivery systems are described by Praunitz et al. (Nature Biotechnology 26:1261-1268. First-generation transdermal delivery systems have continued their steady increase in clinical use for delivery of small, lipophilic, low-dose drugs. Second-generation delivery systems using chemical enhancers, noncavitational ultrasound and iontophoresis have also resulted in clinical products; the ability of iontophoresis to control delivery rates in real time provides added functionality. Third-generation delivery systems target their effects to skin's barrier layer of stratum corneum using microneedles, thermal ablation, microdermabrasion, electroporation and cavitational ultrasound. Microneedles and thermal ablation are currently progressing through clinical trials for delivery of a variety of macromolecules and vaccines, such as insulin, parathyroid hormone and influenza vaccine. Using these novel second- and third-generation enhancement strategies, transdermal delivery is preferred for delivery of NABTs of the invention to patients having hyperproliferative disorders of the skin and squamous epithelium.

### Example 4

### Anti-Viral NABTs and Methods of Use Thereof for the Treatment of Viral Diseases

[0542] Certain viral diseases are amenable to treatment with the NABTs described herein. For example, eight different herpesviruses infect people. Three of them—herpes simplex virus type 1, herpes simplex virus type 2, and varicella=zoster virus—cause diseases associated with blisters on the skin or mucus membranes. Another herpesvirus, Epstein-Barr virus, causes infectious mononucleosis. Human herpesviruses 6 and 7 cause a childhood condition called roseola infantum. Human herpesvirus 8 has been implicated as a cause of cancer (Kaposi's sarcoma) in people with AIDS. All of the herpesviruses remain within its host cell typically in a dormant (latent) state. Sometimes the virus reactivates and produces further episodes of disease. Reactivation may occur rapidly or many years after the initial infection.

[0543] NABTs useful for treatment of these types of invention include USF, Spi-1, Spi-B, ATF, CREB and C/EBP families, E2F-1, YY-1, Oct-1, Ap-1, Ap-2, c-myb, NF-kappaB, CDK-1, CDK-2, CDK-3, CDK-4, Cyclin B, and WAF-1.

[0544] Human embryonic lung fibroblasts (WI-38) and primary African green monkey kidney cell monolayers (Flow Laboratories, Inc., Rockville, Md.) are suitable cell cultures for optimizing the anti-viral effects of the modified NABTs described herein. The cell lines are maintained on Eagle minimal essential medium supplemented with 2.5% fetal calf serum, 7.5% NaHCO₃, and 80 U of penicillin, 80 μg of streptomycin, 0.04 mg of kanamycin, and 2 U of mycostatin per ml. Human newborn foreskin fibroblast (HFF) monolayers, grown on 12-mm cover slips in 1-dram vials (Bartels Immunodiagnostic Supplies, Inc., Bellevue, Wash.), are similarly maintained. Cell monolayers can be inoculated with fresh or frozen clinical specimens and examined for viral antigen by direct IP staining and cytopathic effect (CPE). Specimens from both genital and nongenital sources can be tested. Specimens can either be immediately inoculated into cell culture or frozen at −70° C. for later processing.

[0545] Once the cultures are prepared, the cells will be incubated in the presence and absence of the above-identified NABTs and the effects on viral antigen production and CPE assessed.

[0546] Cytomegalovirus is a cause of serious disease in newborns and in people with a weakened immune system. It can also produce symptoms similar to infectious mononucleosis in people with a healthy immune system. NABTs directed to the following targets are useful for the treatment of CMV infection: SRF, NF-kappaB, p53, Ap-1, IE-2, C/EBP, Oct-1, Rb, CDK-1, CDK-2, CDK-3, CDK-4, and WAF-1.

[0547] Animal models for the evaluation of therapies against human cytomegalovirus (HCMV) are limited due to the species-specific replication of CMV. However, models utilizing human fetal tissues implanted into SCID mice are available. An alternative approach entails the use of a model incorporating HCMV-infected human foreskin fibroblasts (HFF) seeded onto a biodegradable gelatin matrix (Gelfoam). Infected HFFs are then implanted subcutaneously into SCID mice. Such mice can then be administered the appropriate NABTs of the invention and the effects on reduction in viral titer and/or symptoms can be determined. See Bravo et al., Antiviral Res. (2007) November; 76(2):104-10.

[0548] Many antiviral drugs are currently available which work by interfering with replication of viruses. Most drugs used to treat human immunodeficiency virus (HIV) infection work this way. Several of the NABTs of the invention target molecules required for HIV replication. These include USF, Elf-1, Ap-1, Ap-2, Ap-4, Sp-1, Sp-3, Sp-4, p53, NF-kappaB, rel, GATA-3, UBP-1, EBP-P, ISGF3, Oct-1, Oct-2, Ets-1, NF-ATC, IRF-1, CDK-1, CDK-2, CDK-3, CDK-4, and WAF-1.

[0549] A human T cell line chronically infected with HIV is provided in U.S. Pat. No. 5,459,056. Initially, cells capable of replicating or being killed by HIV will be contacted with a NABT and the effect of the therapeutic on targeted gene function and viral replication assessed. Optionally, animal models of viral infection will also be utilized to assess the modified NABT described herein for efficacy. A suitable animal model for this purpose is described in Ayash-Rashkovsky et al. These investigators report that lethally irradiated normal BALB/c mice, reconstituted with murine SCID bone marrow and engrafted with human PBMC (Trimera mice), were used to establish a novel murine model for HIV-1 infection (FASEB J 2005 July; 19(9):1149-51). The Trimera mice were successfully infected with different clades and primary isolates of T- and M-tropic HIV-1, with the infection persisting in the animals for 4-6 wk. Rapid loss of the human CD4+ T cells, decrease in CD4/CD8 ratio, and increased T cell activation accompanied the viral infection. All HIV-1 infected animals were able to generate both primary and secondary immune responses, including HIV specific human humoral and cellular responses. The NABTs of the invention targeting the molecules listed above will be administered to the mice alone and in combination with other retroviral drugs and the effects on HIV replication and cellular damage assessed.

### Example 5

### NABTs for the Treatment of Diabetes and Method of Use Thereof for the Treatment of the Same

[0550] Diabetes mellitus, often referred to simply as diabetes, is a syndrome of disordered metabolism, usually due to a combination of hereditary and environmental causes, resulting in abnormally high blood sugar levels (hyperglycemia). Blood glucose levels are controlled by a complex interaction of multiple chemicals and hormones in the body, including the hormone insulin made in the beta cells of the pancreas. Diabetes mellitus refers to the group of diseases that lead to high blood glucose levels due to defects in either insulin secretion or insulin action.

[0551] Diabetes develops due to a diminished production of insulin (in type 1) or resistance to its effects (in type 2 and gestational). See World Health Organisation Department of Noncommunicable Disease Surveillance (1999). “Definition, Diagnosis and Classification of Diabetes Mellitus and its Complications”. Both lead to hyperglycemia, which largely causes the acute signs of diabetes: excessive urine production, resulting compensatory thirst and increased fluid intake, blurred vision, unexplained weight loss, lethargy, and changes in energy metabolism.

[0552] All forms of diabetes have been treatable since insulin became medically available in 1921, but there is no cure. The injections by a syringe, insulin pump, or insulin pen deliver insulin, which is a basic treatment of type 1 diabetes. Type 2 is managed with a combination of dietary treatment, exercise, medications and insulin supplementation. However, diabetes and its treatments can cause many complications. Acute complications (hypoglycemia, ketoacidosis, or nonketotic hyperosmolar coma) may occur if the disease is not adequately controlled. Serious long-term complications include cardiovascular disease (doubled risk), chronic renal failure, retinal damage (which can lead to blindness), nerve damage (of several kinds), and microvascular damage, which may cause erectile dysfunction and poor wound healing. Poor healing of wounds, particularly of the feet, can lead to gangrene, and possibly to amputation. Adequate treatment of diabetes, including strict blood pressure control and elimination of certain lifestyle factors (such as not smoking and maintaining a healthy body weight), may improve the risk profile of most of the chronic complications.

[0553] While there are effective pharmaceutical approaches for the administration of diabetes, (e.g., insulin administration, glucagon administration or agents that alter levels of either of these two molecules such as Glucophage®, Avandia®, Actos®, Januvia® and Glucovance®), it is clear given the increased prevalence of this disease, that new efficacious agents are needed for the treatment. Suitable genetic targets for this purpose include, without limitation, NABTs directed to androgen receptor, CDK-4 inhibitor, MTS-2, and p53. Use of such NABTs with the anti-diabetic agents listed above is also within the scope of the invention.

[0554] Cells and cell lines suitable for studying the effects of the NABT and modified forms thereof on glucose metabolism and methods of use thereof for drug discovery are known in the art. Such cells and cell lines will be contacted with the NABT described herein and the effects on glucagon secretion, insulin secretion and/or beta cell apoptosis can be determined. The NABT will be tested alone and in combination of 2, 3, 4, and 5 NABTs to identify the most efficacious combination for down regulating appropriate target genes. Cells suitable for these purposes include, without limitation, INS cells (ATCC CRL 11605), PC12 cells (ATCC CRL 1721), MIN6 cells, alpha-TC6 cells and INS-1 832/13 cells (Fernandez et al., J. of Proteome Res. (2007). 7:400-411). Pancreatic islet cells can be isolated and cultured as described in Joseph, J. et al., (J. Biol. Chem. (2004) 279:51049). Diao et al. (J. Biol. Chem. (2005) 280:33487-33496), provide methodology for assessing the effects of the NABTs provided herein on glucagon secretion and insulin secretion. Park, J. et al. (J. of Bioch. and Mol. Biol. (2007) 40:1058-68) provide methodology for assessing the effect of these therapeutics on glucosamine induced beta cell apoptosis in pancreatic islet cells.

[0555] A wide variety of expression vectors are available for expression of the NABT, should that be desirable to facilitate delivery to the target cells. Expression methods are described by Sambrook et al. Molecular Cloning: A Laboratory Manual or Current Protocols in Molecular Biology 16.3-17.44 (1989).

### Example 7

### NABTs Effective for Reprogramming Normal Cells

[0556] NABTs provided herein are capable of reprogramming normal cells. This feature has many applications, including but not limited to (1) generating induced pluripotent stem cells (iPS) from various somatic starting cell types such as but not limited to brain-derived neural stem cells, keratinocytes, hair follicle stem cells, fibroblasts and hematopoietic cells; (2) maintaining and expanding embryonic stem cells (ES); and (3) directing the differentiation of iPS or ES into desired cell types such as but not limited to nerve, cardiac or islet cells. ES and iPS cells can be used for a variety of medical purposes including but not limited to tissue repair. Other examples of medical conditions that can benefit from normal cell reprogramming include but are not limited to the medical need to compensate for insufficient numbers of particular normal cell types such as lymphocytes, granulocytes or megakaryocytes such as might be required to fight an infection, to replace damaged normal tissue or to increase cell numbers in vitro or in vivo for subsequent harvesting for transplant.

[0557] Tissue culture of immortal cell strains from diseased patients is an invaluable resource for medical research but is largely limited to tumor cell lines or transformed derivatives of native tissues. See Park et al. (2008) Cell, 34:877-886. These investigators have generated induced pluripotent stem (iPS) cells from patients with a variety of genetic diseases with either Mendelian or complex inheritance. Exemplary diseases include adenosine deaminase deficiency-related severe combined immunodeficiency (ADA-SCID), Shwachman-Bodian-Diamond syndrome (SBDS), Gaucher disease (GD) type III, Duchenne (DMD) and Becker muscular dystrophy (BMD), Parkinson disease (PD), Huntington disease (HD), juvenile-onset, type 1 diabetes mellitus (JDM), Down syndrome (DS)/trisomy 21, and the carrier state of Lesch-Nyhan syndrome. Such disease-specific stem cells offer an unprecedented opportunity to recapitulate both normal and pathologic human tissue formation invitro, thereby enabling disease investigation and drug development. These cells provide a unique resource for assessing the reprogramming capacity of the NABTs disclosed herein.

### Example 8

### NABTs Effective for the Treatment of Diamond Blackfan Anemia

[0558] Diamond-Blackfan anemia (DBA) is characterized by anemia (low red blood cell counts) with decreased erythroid progenitors in the bone marrow. This usually develops during the neonatal period. About 47% of affected individuals also have a variety of congenital abnormalities, including craniofacial malformations, thumb or upper limb abnormalities, cardiac defects, urogenital malformations, and cleft palate. Low birth weight and generalized growth delay are sometimes observed. DBA patients have a modest risk of developing leukemia and other malignancies.

[0559] Children with DBA fail to make red blood cells and carry mutations in one copy of any of several genes encoding ribosomal proteins, which are essential components of the protein synthesis machinery. RPS19 is the most frequently mutated RP in DBA. RPS19 deficiency impairs ribosomal biogenesis. Danilova et al. (Blood (2008) 112: 5228-37) report that rps19 deficiency in zebrafish results in hematopoietic and developmental abnormalities resembling DBA. Their data suggest that the rps19-deficient phenotype is mediated by dysregulation of deltaNp63 and p53. During gastrulation, deltaNp63 is required for specification of nonneural ectoderm and its up-regulation suppresses neural differentiation, thus contributing to brain/craniofacial defects. In rps19-deficient embryos, deltaNp63 is induced in erythroid progenitors and may contribute to blood defects. These investigators have shown that suppression of p53 and deltaNp63 alleviates the rps19-deficient phenotypes. Mutations in other ribosomal proteins, such as S8, S11, and S18, also lead to up-regulation of p53 pathway, suggesting it is a common response to ribosomal protein deficiency. These findings provide new insights into pathogenesis of DBA. Ribosomal stress syndromes represent a broader spectrum of human congenital diseases caused by genotoxic stress; therefore, imbalance of p53 family members provides new targets for therapeutics.

[0560] As mentioned herein previously, the present inventor has designed a variety of discrete NABTs which down modulate expression of p53. Such NABTs can be used to advantage to treat and ameliorate the symptoms of DBA and other disorders where ribosomal defects lead to an activation of p53 expression. The sequences of these NABTs effective to inhibit expression of p53 are provided in Table 8 along with the NABT combinations provided in Table 23. However, administration of OL(1)p53 (cenersen) (SEQ ID NO: 4) which is a phosphorothioate oligo is suitable for this purpose. The use of this sequence with a 2′ fluoro gapmer is most preferred along with the oligo combinations described in Table 23 with backbones acting via steric hindrance as described elsewhere herein. For the treatment of such disorders, it preferable to administer the NABTs of the invention systemically.

### Example 9

### NABTs Targeting SGP2 for the Treatment of Disorders Characterized by Aberrant Apoptosis

[0561] SGP2 (TRPM-2 or clusterin) is expressed in cells in multiple forms as reflected in differences in amino acid sequence and non-translated sequences that are involved in regulating expression of the corresponding protein. Andersen et al. (Mol Cell Proteomics 6: 1039, 2007) have described three variants of SGP2 encoded proteins termed CLU34 (NCBI Reference Sequence NM_{—}001831), CLU35 (NCBI Reference Sequence NM_{—}203339) and CLU36 (sequence provided in supplemental information accompanying Andersen et al.). CLU 34 and CLU35 localize to the cytoplasm and are anti-apoptotic while CLU 36 is apoptotic and concentrates in the nucleus. The SGP2 gene has a total of 9 exons. The mRNA variants described by Anderson et al. each possess different first exons. CLU 34 is the variant most commonly reported in the literature. It can be secreted by cells and has a variety of extracellular functions that include interactions with growth factor pathways, such interactions being associated with inhibition of apoptosis. Leskov et al., (J Biol Chem 278: 21055, 2003) have described yet another apoptotic form in addition to CLU36 that is derived from CLU34 by an alternative splicing mechanism that results in the deletion of exon 2. The primary translational start site for CLU34 is in its first exon while the primary start site for CLU35 is in exon 2. CLU36 has a primary start site in its first exon. Alternately spliced CLU34 has its primary translational start site in exon 3.

[0562] All three SGP2 mRNA forms described by Andersen et al. are subject to differential regulation of their expression by various cellular processes which can be altered in diseased cells. For example, patterns of expression are typically altered in cancer cells such that: expression levels of the anti-apoptotic variants are increased relative to the apoptotic variants. In prostate cancer, for example, CLU34 is repressed by androgens while CLU35 is up-regulated (Cochrane et al., J Biol Chem 282: 2278, 2007). Further, CLU35 is up-regulated in prostate cancer as it progresses to androgen independence.

[0563] Two homologs (CLI and SP-40,40) are also produced by the SGP2 gene. These are distinguished by substantial divergences in the 5′ untranslated sequence particularly those in the general boundary region between intron I and exon II. This region includes hotspot 9 of the TRPM-2 gene in Table 8 which can be targeted to differentially affect the expression of these homologs. Both of these homologs bind to complement components and inhibit complement mediated cellular lysis and are of importance in biological processes such as reproduction.

[0564] A conventional antisense oligo directed to SGP2 with the sequence (5′-CAGCAGCAGAGTC TTCATCAT-3′-SEQ ID NO: 3799) is in development as a possible therapeutic agent (Schmitz, Current Opinion Mol Ther 8: 547, 2006; US 2004/0053874; 2008/0014198; U.S. Pat. Nos. 6,383,808; 6,900,187; 7,285,541; 7,368,436; WO 02/22635; 2006/056054). The terminal four nucleosides on each end of this oligo (indicated by underlining) have 2′-O-methyoxyethyl modifications to their sugar moieties. The linkages between all 21 nucleotides are phosphorothioate and the central 13 nucleosides all have deoxyribose as the sugar. It has been shown to modestly sensitize some cancer cells, including prostate cancer cells, to radiation and chemotherapeutic agents (Schmitz, Current Opinion Mol Ther 8: 547, 2006; Zellweger et al. (J Pharm Exp Ther 298: 934, 2001 and Clin Cancer Res 8: 3276, 2002). This oligo is directed to the primary translational start site for CLU35 in exon 2, but because it has an RNase H dependent mechanism of action rather than a steric hindrance mechanism of action, it indiscriminately also down-regulates CLU34 and CLU36 because they express the same exon 2. Thus, this oligo inhibits both anti-apoptotic and apoptotic forms of SGP2. Chen et al., (Cancer Res 64: 7412, 2004) have shown that this oligo can inhibit the induction of apoptosis in some cancer cells, including those deficient in p21 (WAF-1) expression, which is highly undesirable in a potential anti-cancer agent. This feature, along with its relatively poor suppressive activity on SGP2 expression is associated with a relatively low level of therapeutic efficacy.

[0565] Table 8 provides prototype conventional antisense oligo sequences and their size variants that when combined with the preferred or most preferred backbones produce surprisingly better gapmer oligos with RNase H activity in terms of suppressing SGP2 (also listed as TRPM-2 in Table 8) expression and in producing therapeutic effects such as sensitizing cancer cells to conventional cancer treatments or protecting nerve cells from the induction of apoptosis when compared to those SGP2 targeting oligos provided in the prior art such as the one just described. Specifically, 2′-fluoro gapmers with phosphorothioate linkages are most preferred with FANA or LNA gapmers being preferred. More details on gapmer oligos suitable for use in the present invention are provided elsewhere herein.

[0566] As mentioned above, certain SGP2 variants encode anti-apoptotic proteins while other variants possess apoptotic activities. When one or the other of these activities is not selectively blocked then the activity of the NABT will depend on which activity is dominant in any given situation. Selectively blocking the anti-apoptotic activity would be appropriate for treating a disorder such as cancer while selectively blocking apoptotic activity would be appropriate for the treatment of Alzheimer's Disease, for example. Table 11 lists several medical indications where NABTs directed to SGP2 should exhibit efficacy. These indications include both those characterized by pathologic induction of apoptosis as well as those where there is a pathologic resistance to the induction of apoptosis.

[0567] SGP2 transcripts encoding anti-apoptotic proteins can be selectively targeted by NABTs using one of the following design considerations: (1) the use of (a) conventional antisense oligos that support RNase H activity, (b) expression vectors or (c) siRNA or dicer substrate guide strands where the NABT binds to a segment of exon 1 of SGP2 variant CLU34 (Hot Spot 4, SEQ ID NO: 3755, in Table 8) or to a segment of exon 1 of SGP2 variant CLU35 (Hot Spot 2, SEQ ID NO: 3766, in Table 8); or (2) the use of conventional antisense oligos with selective steric hindrance activity against primary or both primary and secondary translational start sites for SGP2 variant CLU 34 (Table 18) or with selective steric hindrance activity against primary or both primary and secondary or alternative secondary translational start sites for SGP2 variant CLU35 (Table 19). Secondary translational start sites are used by cells when the primary translational start site is blocked such as by an antisense oligo with a steric hindrance mechanism.

[0568] In addition, an NABT directed to exon 1 of SGP2 variant CLU34 may be used in combination with an NABT directed to exon 1 of SGP2 variant CLU35 to simultaneously eliminate expression of both of these anti-apoptotic variants where the NABTs involved are (a) conventional antisense oligos that support RNase H activity, (b) expression vectors or (c) siRNA or dicer substrates. For cancer treatment application such NABTs will typically be used in combination with other agents that promote apoptosis such as chemotherapy, radiation and modulators of hormone activity in the case of hormonally dependent cancers.

[0569] SGP2 transcripts encoding apoptotic protein SGP2 variant CLU36 can be selectively targeted by NABTs using one of the following design considerations: (1) the use of conventional antisense oligos that support RNase H activity, expression vectors or guide strands that bind to exon 1 of SGP2 variant CLU 36 (Table 8, Hot Spot 3, SEQ ID NO: 3781); or (2) the use of conventional antisense oligos with selective steric hindrance activity against the primary and its secondary translational start site (Table 20) or the alternative primary and its secondary translational start site (Table 21).

[0570] SGP2 transcripts encoding apoptotic protein that is produced by the removal of exon 2 by alternative splicing of CLU34 can be selectively targeted by NABTs by the use of conventional antisense oligos with selective steric hindrance activity against primary or both primary and secondary translational start sites in exon 3 (Table 22).

[0571] Table 8 provides for each hot spot (presented as an antisense sequence) at least one prototype conventional antisense or prototype RNAi oligo sequence along with a listing of size variant oligo sequences that are suitable for use in NABTs in accordance with the present invention. Interpretation of the information set forth in Table 8 has been provided hereinabove.

[0572] The use of particular primary or secondary start sites, where they occur on a tissue specific basis, can be readily determined using monoclonal antibodies directed to protein sequences that would appear upstream or downstream of particular translational start sites to determine whether or not the start site is being utilized. If it is used the upstream sequence will not be seen in a Western or similar blot or other appropriate assay method and the downstream sequence will be seen. If it is not used both protein sequences will be recognized.

[0573] As for other gapmer containing conventional antisense oligos provided by the present invention, those comprising 2′-fluoro substituted sugar analogs in the terminal 5′ and 3′ nucleotides and phosphorothioate linkages between all the nucleotides are most preferred as described more fully elsewhere herein. For conventional antisense oligos with an exclusively steric hindrance mechanism of action, 2′-fluoro substituted sugar analogs for all the nucleotides coupled with phosphorothioate linkages are most preferred. Preferred chemistries are also more fully described elsewhere herein and include the following: (1) morpholino or piperazine sugar substitution in all nucleosides; (2) LNA sugar substitution in all nucleosides; and (3) FANA sugar modification in all nucleosides.

[0574] NABTs which block the anti-apoptotic effects of SGP2 variants are particularly desirable for the treatment of prostate cancer. Such NABTs can be administered systemically or directly injected into the tumor. They can be used in combination with chemotherapy, biotherapy or radiation considered appropriate for the cancer. The treatment regimens set forth above may also comprise administration of chemotherapeutic agents such as abarelix, abiraterone acetate and Degarelix.

[0575] The following tables are provided to facilitate the practice of the present invention.

Lengthy table referenced here
US20120156138A1-20120621-T00001
Please refer to the end of the specification for access instructions.

Lengthy table referenced here
US20120156138A1-20120621-T00002
Please refer to the end of the specification for access instructions.

Lengthy table referenced here
US20120156138A1-20120621-T00003
Please refer to the end of the specification for access instructions.

Lengthy table referenced here
US20120156138A1-20120621-T00004
Please refer to the end of the specification for access instructions.

Lengthy table referenced here
US20120156138A1-20120621-T00005
Please refer to the end of the specification for access instructions.

Lengthy table referenced here
US20120156138A1-20120621-T00006
Please refer to the end of the specification for access instructions.

Lengthy table referenced here
US20120156138A1-20120621-T00007
Please refer to the end of the specification for access instructions.

Lengthy table referenced here
US20120156138A1-20120621-T00008
Please refer to the end of the specification for access instructions.

Lengthy table referenced here
US20120156138A1-20120621-T00009
Please refer to the end of the specification for access instructions.

Lengthy table referenced here
US20120156138A1-20120621-T00010
Please refer to the end of the specification for access instructions.

Lengthy table referenced here
US20120156138A1-20120621-T00011
Please refer to the end of the specification for access instructions.

Lengthy table referenced here
US20120156138A1-20120621-T00012
Please refer to the end of the specification for access instructions.

Lengthy table referenced here
US20120156138A1-20120621-T00013
Please refer to the end of the specification for access instructions.

Lengthy table referenced here
US20120156138A1-20120621-T00014
Please refer to the end of the specification for access instructions.

Lengthy table referenced here
US20120156138A1-20120621-T00015
Please refer to the end of the specification for access instructions.

Lengthy table referenced here
US20120156138A1-20120621-T00016
Please refer to the end of the specification for access instructions.

Lengthy table referenced here
US20120156138A1-20120621-T00017
Please refer to the end of the specification for access instructions.

Lengthy table referenced here
US20120156138A1-20120621-T00018
Please refer to the end of the specification for access instructions.

Lengthy table referenced here
US20120156138A1-20120621-T00019
Please refer to the end of the specification for access instructions.

Lengthy table referenced here
US20120156138A1-20120621-T00020
Please refer to the end of the specification for access instructions.

Lengthy table referenced here
US20120156138A1-20120621-T00021
Please refer to the end of the specification for access instructions.

Lengthy table referenced here
US20120156138A1-20120621-T00022
Please refer to the end of the specification for access instructions.

Lengthy table referenced here
US20120156138A1-20120621-T00023
Please refer to the end of the specification for access instructions.

[0576] While certain preferred embodiments of the present invention have been described and specifically exemplified above, it is not intended that the invention be limited to such embodiments. Various modifications may be made to the invention without departing from the scope and spirit thereof as set forth in the following claims.

LENGTHY TABLES
The patent application contains a lengthy table section. A copy of the table is available in electronic form from the USPTO web site (http://seqdata.uspto.gov/?pageRequest=docDetail&DocID=US20120156138A1). An electronic copy of the table will also be available from the USPTO upon request and payment of the fee set forth in 37 CFR 1.19(b)(3).

What is claimed is:

1. A composition, comprising in a biologically acceptable carrier, at least one nucleic acid based therapeutic (NABT) for down modulating target gene expression, said NABT comprising a nucleic acid sequence which inhibits production of at least one gene product encoded by said target gene, said sequence optionally comprising one or more modifications selected from the group consisting of
i) at least one modification to the phosphodiester backbone linkage;
ii) at least one modification to a sugar in said nucleic acid;
iii) a support;
iv) at least one cellular penetrating peptide or a cellular penetrating peptide mimetic;
v) an endosomal lytic moiety;
vi) at least one specific binding pair member or targeting moiety; and
viii) operable linkage to an expression vector,
wherein said nucleic acid sequence is selected from the group of sequences in Table 8, with the proviso that when i, ii, iii, iv, v, vi, viii are absent, said nucleic acid is not SEQ ID NOS: 1, 2, 3, 4, or 2265-2293.

2. The composition of claim 1, wherein said nucleic acid comprises at least one modified linkage selected from the group consisting of phosphorothioate linkages, methylphosphonate linkages, ethylphosphonate linkages, boranophosphate linkages, sulfonamide, carbonylamide, phosphorodiamidate, phosphorodiamidate linkages comprising a positively charged side group, phosphorodithioates, aminoethylglycine, phosphotriesters, aminoalkylphosphotriesters; 3′-alkylene phosphonates; 5′-alkylene phosphonates, chiral phosphonates, phosphinates, 3′-amino phosphoramidate, aminoalkylphosphoramidates, thionophosphoramidates; thionoalkyl-phosphonates, thionoalkylphosphotriesters, selenophosphates, 2′-5′ linked boranophosphonate analogs, linkages having inverted polarity, abasic linkages, short chain alkyl linkages, cycloalkyl internucleoside linkages, mixed heteroatom and alkyl or cycloalkyl internucleoside linkages, short chain heteroatomic or heterocyclic internucleoside linkages with siloxane backbones, sulfide, sulfoxide, sulfone, formacetyl linkages, thioformacetyl linkages, methylene formacetyl linkages, thioformacetyl linkages, riboacetyl linkages, alkene linkages, sulfamate backbones, methyleneimino linkages, methylenehydrazino linkages, sulfonate linkages, and amide linkages.

3. The composition of claim 1 or 2, which comprises at least one modified sugar selected from the group consisting of 2′ fluoro, 2′ fluoro substituted ribose, 2-fluoro-D-arabinonucleic acid, 2′-O-methoxyethyl ribose, 2′-O-methoxyethyl deoxyribose, 2′-O-methyl substituted ribose, a morpholino, a piperazine, and a locked nucleic acid.

4. The composition of claim 1, 2 or 3 wherein said nucleic acid is a conventional antisense nucleic acid which functions via a steric hindrance mechanism.

5. The composition of claim 1 or 2, or 3, wherein said nucleic acid is a modified antisense nucleic acid which functions by triggering RNAse H activity.

6. The composition of claim 5, wherein said nucleic acid is a gapmer which promotes RNAse H activity and exhibits increased binding affinity for said target nucleic acid.

7. The composition of claim 1, wherein said nucleic acid is an RNAi.

8. The composition of claim 1 or 2, or 7 wherein said nucleic acid sequence is operably linked to an expression vector which produces an NABT which inhibit expression of said target gene upon introduction of said vector into a cell.

9. The composition of claim 5 or 6, comprising a modification selected from the group consisting of a LNA modification, a FANA modification, a 2′ fluoro substituted ribose, at least one morpholino, or at least one piperazine, wherein NABT is a 14-22mer with phosphorothioate linkages and a 4-18 nucleoside core comprising deoxyribose or a functional analog thereof.

10. The composition of claim 9, wherein said gapmer comprises at least one base modification selected from the group consisting of 4′-C-hydroxymethyl-DNA, 3′-C-hydroxymethyl-arabinonucleic acid, piperazino-functionalized C3′,02′-linked arabinonucleic acid, wherein said modified base is inserted near the center of the NABT within 4 nucleosides of either the 5′ or 3′ end of said NABT.

11. The composition of claim 9 or 10 comprising at least one modified nucleotide selected from the group consisting of 2′ fluoro-arabinonucleotides, abasic nucleotides, tetrahydrofurans (THF), bases shown in Formulas I, II and III wherein each of _{R1-8} is independently selected from H, halogen, and C₁₋₃ alkyl, R₈ may also be independently selected from fluorine and methyl, and bases selected from Formulas IV-XII.

12. The composition of claim 1 to claim 11, comprising a support selected from the group consisting of nanoparticles, dendrimers, nanocapsules, nanolattices, microparticles, micelles, Hemagglutinating virus of Japan (HVJ) envelope, spiegelmers, and liposomes.

13. The composition of claim 1 to claim 12 wherein said NABT is operably linked to a cellular penetrating peptide or mimetic thereof selected from the group consisting of one or more of
(SEQ ID NO: 3631)
KRRQRRR;
(SEQ ID NO: 3632)
GYGRKKRRQRRR;
(SEQ ID NO: 3633)
YGRKKRRQRRR;
(SEQ ID NO: 3634)
CYGRKKRRQRRR;
(SEQ ID NO: 3635)
RKKRRQRRRPPQC;
(SEQ ID NO: 3636)
CYQRKKRRQRRR;
(SEQ ID NO: 3637)
RKKRRQRRR;
(SEQ ID NO: 3638)
GALFLGF(or W)LGAAGSTMGA;
(SEQ ID NO: 3639)
GALFLGF(or W)LGAAGSTMGAWSQPKKKRKV;
(SEQ ID NO: 3640)
GALFLGF(or W)LGAAGSTMGAWSQPKSKRKV;;
(SEQ ID NO: 3641)
RQIKIWFQNRRMKWKK;
(SEQ ID NO: 3642)
RQIKIWFQNRRMKWKKGGC;
(SEQ ID NO: 3643)
LIRLWSHLIHIWFQNRRLKWKKK;
(SEQ ID NO: 3644)
GLFGAIAGFIENGWEGMIDGRQIKIWFQNRRMKWKK;
SEQ ID NO: 3645)
FFGAVIGTIALGVATA;
(SEQ ID NO: 3646)
FLGFLLGVGSAIASGV;
(SEQ ID NO: 3647)
GVFVLGFLGFLATAGS;
(SEQ ID NO: 3648)
GAAIGLAWIPYFGPAA;
(SEQ ID NO: 3649)
DAATATRGRSAASRPTERPRAPARSASRPRRPVD (or E);
(SEQ ID NO: 3650)
KLAKLLALKALKAALKLA;
(SEQ ID NO: 3651)
KLALKLALKALKAALKLA;
(SEQ ID NO: 3652)
KETWWETWWTEWSQPKKKRKV;
(SEQ ID NO: 3653)
KETWFETWFTEWSQPKKKRKV;
(SEQ ID NO: 3654)
KXaaXaaWWETWWXaaXaaXaaSQPKKXaaRKXaa;
(SEQ ID NO: 3655)
KETWWETWWTEWSQPKKRKV;
(SEQ ID NO: 3656)
KETWWETWWTEASQPKKRKV;
(SEQ ID NO: 3657)
KETWWETWWETWSQPKKKRKV;
(SEQ ID NO: 3658)
KETWWETWTWSQPKKKRKV;
(SEQ ID NO: 3659)
KWWETWWETWSQPKKKRKV;
(SEQ ID NO: 3660)
KETWWETWWXaaXaaWSQPKKKRKV;
(SEQ ID NO: 3661)
GALFLGWLGAAGSTM;
(SEQ ID NO: 3662)
GALFLGWLGAAGSTMGAWSQPKKKRKV;
(SEQ ID NO: 3663)
MVKSKIGSWILVLFVAMWSDVGLCKKRPKP;
(SEQ ID NO: 3664)
RGGRLSYSRRRFSTSTGR;;
(SEQ ID NO: 3665)
RRLSYSRRRF;;
(SEQ ID NO: 3666)
GWILNSAGYLLGKINLKALAALAKKIL;
(SEQ ID NO: 3667)
AGYLLGKINLKALAALAKKIL;
(SEQ ID NO: 3668)
R6WGR6-PKKKRKV;
(SEQ ID NO: 3669)
R4SR6FGR-6VWR4-PKKKRKV;
(SEQ ID NO: 3677)
S413PV;
(SEQ ID NO: 3678)
SAP;
(SEQ ID NO: 3680)
ARF based CPP;
(SEQ ID NO: 3681)
ARF based CPP;
(SEQ ID NO: 3682)
ARF based CPP;
(SEQ ID NO: 3691)
Anti-microbial peptide;
(SEQ ID NO: 3692)
Anti-microbial peptide;
(SEQ ID NO: 3693)
Anti-microbial peptide;
(SEQ ID NO: 3694)
Anti-microbial peptide;
(SEQ ID NO: 3695)
Anti-microbial peptide;
(SEQ ID NOS: 3696-3713, 3800 and 3801)
Designer CPPs;
and
(SEQ ID NO: 3697)
Designer CPP.

14. The composition of claim 1 to claim 13, comprising an endosomal lytic component.

15. The composition of claim 1 to claim 14 comprising at least one member of a specific binding pair or targeting moiety.

16. The composition of claim 15 wherein said binding pair member or targeting moiety is selected from the group consisting of ligands for leptin receptor, ligands for lipoprotein receptor, peptides that target the LOX-1 receptor, LFA-1 targeting moieties, NL4-10K, IFG-1 targeting peptides, ligands for the transferrin receptor, ligands for transmembrane domain protein 30A, ligands for asialoglycoprotein receptor, Trk targeting ligands, an actively transported nutrient, RVG peptide, heart homing peptides, peptide for ocular delivery, and PH-50.

17. The composition of claim 1 to claim 16, operably linked to an expression vector, said vector facilitating cellular uptake and expression of said NABT encoding sequences within the cell resulting in down modulation of the sequence targeted by said NABT.

18. The composition as claimed in claim 7 or 16, wherein said NABT is a double stranded dicer substrate RNA comprising a passenger strand and a guide strand 25-30-nucleotides in length which is cleaved intracellularly to form substantially double stranded 21-mers with a two nucleotide (2-nt) overhang on each 3′ end.

19. The composition of claim 18, wherein the 5′ end of a passenger strand RNA is blocked with an alkyl group, thereby increasing guide strand loading into the RISC complex.

20. The composition of claim 19, wherein said passenger strand is nicked or comprises a gap.

21. The composition of claim 18, wherein a 5′ end of the passenger strand is modified at 1, 2, 3 or 4 positions, thereby increasing Tm of duplex formation with a corresponding guide strand.

22. The composition of claim 18, wherein the affinity of the four nucleotides at the 3′ end of the passenger stand for the 5′ end of the guide strand is decreased relative to the opposite end of the duplex.

23. A formulation, comprising the composition of claim 1 to claim 22, suitable for systemic, aerosolized, oral and topical formulations.

24. The formulation of claim 23, selected from the group consisting of oral, intrabuccal, intrapulmonary, rectal, intrauterine, intratumor, intracranial, nasal, intramuscular, subcutaneous, intravascular, intrathecal, inhalable, transdermal, intradermal, intracavitary, implantable, iontophoretic, ocular, vaginal, intraarticular, otical, intravenous, intramuscular, intraglandular, intraorgan, intralymphatic, implantable, slow release, and enteric coating formulations.

25. A method for down modulating expression of a target gene for the treatment of an aberrant programming disease in a target cell, said method comprising administration of an effective amount of at least one composition comprising an NABT as claimed in any one of the preceding claims, thereby reprogramming said target cell, said reprogramming altering the aberrant programming disease phenotype thereby providing a beneficial therapeutic or commercial effect.

26. The method of claim 25, wherein said NABT down modulates expression of a transcriptional regulator.

27. The method of claim 25, wherein said NABT down modulates expression of a direct modifier of a transcriptional regulator.

28. The method of claim 25, wherein said reprogramming is therapeutically beneficial to diseased cells and normal cells are not adversely affected.

29. The method of claim 25 to claim 28, wherein said cell is in a patient.

30. The method of claim 25 to claim 29, further comprising administration of an augmentation agent, selected from the group consisting of antioxidants, polyunsaturated fatty acids, chemotherapeutic agents, genome damaging agents and ionizing radiation.

31. A method as claimed in claim 25 to claim 30, wherein said disease is selected from the group consisting of Cancer, AIDS, Alzheimer's disease, Amyotrophic lateral sclerosis, Atherosclerosis, Autoimmune Diseases, Cerebellar degeneration, Cancer, Diabetes Mellitus, Glomerulonephritis, Heart Failure, Macular Degeneration, Multiple sclerosis, Myelodysplastic syndromes, Parkinson's disease, Prostatic hyperplasia, Psoriasis, Asthma, Retinal Degeneration, Retinitis pigmentosa, Rheumatoid arthritis, Rupture of atherosclerotic plaques, Systemic lupus erythematosis, Ulcerative colitis, viral infection, ischemia reperfusion injury, cardiohypertrophy, and Diamond Black Fan anemia.

32. The method as claimed in claim 31, wherein said disease is a viral disease and said NABT is effective to reduce viral replication, load or spread.

33. The method as claimed in claim 32, wherein said viral disease is HIV and said target is selected from the group consisting of at least one of USF, Ap-2, Ap-4, Sp-1, Sp-3, Sp-4, p53, NF-κβ, and C/EBP.

34. An anti-viral composition effective against HIV for use in the method of claim 32, comprising at least one NABT having a sequence selected from the group consisting of USF (SEQ ID NOS: 3484-3508), Ap-2 (SEQ ID NOS: 48-84), Ap-4 (SEQ ID NOS: 85-107), Sp-1 (SEQ ID NOS: 3198-3208), Sp-3 (SEQ ID NOS: 3209-3212), Sp-4 (SEQ ID NOS: 3213-3219), p53 (SEQ ID NOS:4, 2806-2815, 3606-3626, and 3786-3798), (NF-κβ SEQ ID NOS: 2524-2620), and C/EBP (SEQ ID NOS: 336-345) in pharmaceutically acceptable carrier.

35. The method as claimed in claim 32, wherein said viral disease is CMV and said target is selected from the group consisting of at least one of SRF, NF-κβ, p53, and C/EBP.

36. An anti-viral composition effective against CMV for use in the method of claim 35, comprising an effective amount of at least one NABT having a sequence selected from the group consisting of at least one of SRF (SEQ ID NOS: 3260-3290), NF-κβ (SEQ ID NOS: 2524-2620), p53 (SEQ ID NOS:4, 2806-2815, 3606-3626, and 3786-3798), and C/EBP (SEQ ID NOS: 336-345) in a pharmaceutically acceptable carrier.

37. The method as claimed in claim 32, wherein said viral disease is herpesvirus and said target is USF, Spi-1, Spi-B, ATF, CREB, C/EBP, E2F, YY-1, Oct-1, Ap-1, Ap-2, c-myb, and NF-κβ.

38. An anti-viral composition effective against herpes virus infection for use in the method of claim 37, comprising an effective amount of at least one NABT having a sequence selected from the group consisting of USF (SEQ ID NOS: 3484-3508), Spi-1 (SEQ ID NOS: 3220-3240), Spi-B (SEQ ID NOS: 3241-3259), ATF (SEQ ID NOS: 194-205), CREB (SEQ ID NOS: 515-577), C/EBP (SEQ ID NOS: 336-345), E2F (SEQ ID NOS: 846-888), YY-1 (SEQ ID NOS: 3596-3601), Oct-1 (SEQ ID NOS: 2631-2653), Ap-2 (SEQ ID NOS: 48-84), c-myb (SEQ ID NOS: 382-387), and NF-κβ (SEQ ID NOS: 2524-2620) in a pharmaceutically acceptable carrier suitable for topical administration.

39. The method as claimed in claim 32, wherein said viral disease is hepatitis virus and said target is NF-1, Ap-1, Sp-1, RFX-1, RFX-2, RFX-3, NF-κβ, Ap-2 and C/EBP.

40. An anti-viral composition effective against hepatitis virus for use in the method of claim 39, comprising an effective amount of at least one NABT having a sequence selected from the group consisting of Sp-1 (SEQ ID NOS 3198-3208), NF-κβ (SEQ ID NOS: 2524-2620), Ap-2 (SEQ ID NOS: 48-84) and C/EBP (SEQ ID NOS: 336-345).

41. The method as claimed in claim 31, wherein said disease in heart failure and said target is selected from the group consisting of p53, BCL-X, Bcl-2-like 1, BCL2L1, BCL2L, Bcl-xS, FAS/APO1, Pro-apoptotic form of gene product, DB-1, (ZNF161; VEZF1), ICE (CASP1; Caspase-1), NF-kappaB, PKC alpha, SRF and VEGF, said NABT optionally being linked to a heart homing peptide.

42. A composition useful for the treatment of heart failure for use in the method of claim 41, comprising an effective amount of at least one NABT having a sequence selected from the group consisting of those targeting p53, BCL-X, Bcl-2-like 1, BCL2L1, BCL2L, Bcl-xS, FAS/APO 1, Pro-apoptotic form of gene product, DB-1, (ZNF161; VEZF1), ICE (CASP1; Caspase-1), NF-kappaB, PKC alpha, SRF and VEGF, said NABT optionally being operably linked to a heart homing peptide in a pharmaceutically acceptable carrier.

43. The composition of claim 42, comprising a heart homing peptide of SEQ ID NOS 3715-3719.

44. The method as claimed in claim 31, wherein said disease is cancer and said sequence targeted by said NABT is selected from the group consisting of at least one of 5 alpha reductase, A-myb, ATF-3, B-myb, β-amyloid precursor protein, BSAP, C/EBP, c-fos, c-jun, c-myb, c-myc, CDK-1, CDK-2, CDK-3, CDK-4, CDK-4 inhibitor (Arf), cHF.10, COX-2, CREB, CREBP1, Cyclins A, B, D1, D2, D3, DB-1, DP-1, E12, E2A, E2F-1, E2F-2, E47, ELK-1, Epidermal Growth Factor Receptor, ERM, (ETV5), estrogen receptor, ERG-1, ERK-1, ERK3, ERK subunit A, ERK subunit B, Ets-1, Ets-2, FAS/APO-1, FLT-1, FLT-4, Fra-1, Fra-2, GADD-45, GATA-2, GATA-3, GATA-4, HB9, HB24, h-plk, Hox1.3, Hox 2.3, Hox2.5, Hox4A, Hox 4D, Hox 7, HoxA1, HoxA10, HoxC6, HS1, HTF4a, I-Rel, ICE, ICH-1L, ICH-1S, ID-1, ID-2, ID-3, IRF-1, IRF-2, ISGF3, junB, junD, KDR/FLK-1, L-myc, Lyl-1, MAD-1, MAD-3, MADS/MEF-2, MAX, Mcl-1, MDR-1, MRP, MSX-2, mts1, MXi1, MZF-1, NET, NF-IL6, C/EBPbeta, NF-IL6 beta, NF-kappa B, N-myc, OCT-1, OCT-2, OCT-3, Oct-T1, OCT-T2, OTF-3C, OZF, p53, p107, PDEGF, PDGFR, PES, Pim-1, PKC-alpha, PKC-beta, PKC-delta, PKC-epsilon, PKC-iota, Ref-1, REL, SAP-1, SCL, SGP-2, TRPM-2 Apolipoprotein J; APOJ, Complement associated protein SP 40,40, Complement cytolysis inhibitor, KUB1; CL1, testosterone-repressed prostate message 2), Sp-1, Sp-3, Sp-4, Spi-B, SRF, TGF-beta, TR4, VEGF, Waf-1, WY-1 and YY-1, said method optionally comprising administration of an at least one augmention agent, chemotherapeutic, biologic or anti-proliferative agent.

45. The method as claimed in claim 44, wherein said cancer is selected from the group consisting of brain cancer, lung cancer, ovarian cancer, breast cancer, testicular cancer, kidney cancer, liver cancer, skin cancer, pancreatic cancer, esophageal cancer, stomach cancer, bladder cancer, uterine cancer, prostate cancer, glaucomas, sarcomas, myelomas, lymphomas, and leukemias.

46. The method of claim 44, wherein said agent is selected from the group consisting of at least one of a toxin, saporin, ricin, abrin, ethidium bromide, diptheria toxin, Pseudomonas exotoxin, an alkylating agent, a nitrogen mustards, chlorambucil, cyclophosphamide, isofamide, mechlorethamine, melphalan, uracil mustard; aziridines, thiotepa; a methanesulphonate ester, busulfan; carmustine, lomustine, streptozocin; cisplatin, carboplatin; mitomycin, procarbazine, dacarbazine and altretamine, bleomycin, amsacrine, dactinomycin, daunorubicin, idarubicin, mitoxantrone, doxorubicin, etoposide, teniposide, plicamydin, methotrexate, trimetrexate; fluorouracil, fluorodeoxyuridine, CB3717, azacitidine, cytarabine, floxuridine; mercaptopurine, 6-thioguanine, fludarabine, pentostatin; asparginase, hydroxyurea, vincristine, vinblastine, paclitaxel (Taxol), estrogens; conjugated estrogens; ethinyl estradiol; diethylstilbesterol; chlortrianisen; idenestrol; hydroxyprogesterone caproate, medroxyprogesterone, megestrol; testosterone, testosterone propionate, fluoxymesterone, methyltestosterone, abarelix abiraterone acetate, Degarelix, prednisone, dexamethasone, methylprednisolone, and prednisolone, leuprolide acetate, goserelin acetate, tamoxifen, flutamide, mitotane, and aminoglutethimide.

47. The method of claim 46 wherein said chemotherapeutic agent is selected from the group consisting of: pacitaxel (Taxol®), cisplatin, docetaxol, carboplatin, vincristine, vinblastine, methotrexate, cyclophosphamide, CPT-11, 5-fluorouracil (5-FU), gemcitabine, estramustine, carmustine, adriamycin (doxorubicin), etoposide, arsenic trioxide, irinotecan, and epothilone derivatives.

48. The method of claim 44 to claim 47, wherein said NABT and said anti-cancer or anti-proliferative agent act synergistically.

49. The method of claim 44 to claim 47, wherein said cancer is prostate cancer, said at least one NABT is selected from the group consisting of those targeting 5 alpha-reductase, β amyloid precursor protein, cyclin A, cyclin D3, Oct-T1, p53, Pim-1, Ref-1, SAP-1, SGP2, SRF, TGF-beta, TRPM-2, clusterin and said chemotherapeutic agent is selected from the group consisting of Abarelix, abiraterone acetate, and Degarelix.

50. The method of claim 49 further comprising administration of an augmentation agent.

51. The method of claim 31, wherein said disease is Alzheimer's disease and said sequence targeted by said NABT is selected from the group consisting of apolipoprotein epsilon 4, β amyloid precursor protein, CDK-2, Cox-2, CREB, CREBP, Cyclin B, ICH-1L (also known as caspase 2L), PKC genes, PDGFR, SGP2, SRF, and TRPM-2, said NABT optionally comprising a cellular peneratrating peptide (CPP) to facilitate penetration of the blood brain barrier, thereby enhancing uptake of said NABT into cells of the CNS.

52. The method of claim 31, wherein said disease is Multiple sclerosis and said target is selected from the group consisting of p53, COX-2 TNF-α, and TNF-β and said composition is administered nasally.

53. The method of claim 31 wherein said disease is diabetes and said NABT targets a gene selected from the group consisting of androgen receptor, CDK-4 inhibitor, MTS-2, and p53.

54. The method of claim 53 further comprising administration of at least one agent selected from the group consisting of Glucophage®, Avandia®, Actos®, Januvia® and Glucovance®).

55. The method of claim 31 wherein said disease is asthma and said target is selected from the group consisting of ISGF3, PES, REF-1, and TNF-alpha.

56. The method of claim 55, further comprising administration of at least one agent selected from the group consisting of cortisone, hydrocortisone, prednisone, prednylidene, prednisolone, methylprednisolone, beclomethasone, flunisolide, triamcinolone, deflazacort, betamethasone and dexamethasone.

57. The method of claim 31, wherein said disease is atherosclerosis and said target is selected from the group consisting of at least one of DB-1, DP-1, E2F-1, ERG-1, FLT-4, ICH-1L, ISGF3, NF-IL6, OCT-1, p53, Sp-1, PDEGF, and PDGFR.

58. The method of claim 31, wherein said disease is psoriasis and said target is selected from the group consisting of at least one of Bcl-xL, cyclin A, cyclin B, Flt-1, ICE, ID-1, ISGF3, junB, p53, sp1, TNF-alpha, VEGF, and NF-kappa B and said NABT is administered topically.

59. The method of claim 31, wherein said disease is Diamond Blackfan anemia and said target is p53.

60. The method of claim 59, wherein said NABT has a sequence selected from the group consisting of at least one of SEQ ID NOS: 2806-2818, 3606-3626, 3786-3798 and modified SEQ ID NO: 4.

61. The method of claim 60, wherein SEQ ID NO: 4 comprises a 2′ fluoro gapmer which acts via a steric hindrance mechanism.

62. The method of claim 60, wherein at least two NABTs directed to p53, said pair of NABTs being selected from those in Table 23.

63. The method for the treatment of prostate cancer as claimed in claim 49 or 50 comprising administration of a pair of NABTs directed to SGP-2 or clusterin.

64. The method of claim 63, wherein said NABT directed to SGP-2 or clusterin are selected from those set forth in Tables 18-22.

65. The method as claimed in claim 31, wherein said disease is pulmonary fibrosis and said at least one NABT is aerosolized and targets a gene selected from the group consisting of Fra-2, PDEGF, PDGFR, and SRF.

66. The method as claimed in claim 31, wherein said disease is systemic lupus erythematosis and said at least one NABT targets a gene selected from the group consisting of CREM, Fas/APO-1, HS1, Oct-T1 and p53.

67. A method for optimizing the efficacy of NABT for treatment of aberrant programming diseases:
a) selecting a target gene sequence which regulates cellular programming and a sequence which hybridizes therewith from Table 8;
b) incubating the aberrantly programmed diseased cells in the presence and absence of said at least one NABT molecule, said NABT comprising one or more modifications selected from the group consisting of
i) at least one modification to the phosphodiester backbone linkage;
ii) at least one modification to a sugar in said nucleic acid;
iii) a support;
iv) at least one cellular penetrating peptide or a cellular penetrating peptide mimetic;
v) an endosomal lytic moiety;
vi) at least one specific binding pair member or targeting moiety; and
viii) operable linkage to an expression vector,
c) identifying those NABT which exhibit improved effects on cellular reprogramming relative to cells treated NABT lacking at least one modification of step b); thereby identifying efficacious modified NABT for the treatment of aberrant programming disorders.

68. The method of claim 67, comprising contacting normal cells with the NABT identified in step c) thereby identifying those NABTs which differentially affect cellular programming in aberrantly programmed cells versus normal cells.

69. The method as claimed in claim 67 or claim 68 wherein said aberrant programming disease is selected from the group consisting of AIDS, Alzheimer's disease, Amylotrophic lateral schlerosis, Atherosclerosis, restenosis, Cerebellar degeneration, cancer, Diamond Blackfan anemia, immune-mediated glomerulonephritis, toxin-induced liver disease, multiple organ dysfunction syndrome, multiple sclerosis, myelodysplastic syndrome, myocardial infarction, heart failure, psoriasis, rupture of aortic plaques, Parkinson's disease, ischemia-reperfusion injury, retinitis pigmentosa, arthritis, asthma, stroke, systemic lupus erythematosis,

70. The method of claim 67 to claim 69, wherein said disease comprises aberrant apoptosis and said NABT is directed to bcl-2α or bcl-2β.

71. The method of claim 67 to claim 70 wherein said NABT is directed to a transcriptional regulator selected from the group consisting of
p34 (cdc2), SEQ ID NOS: 944-966;
p53 (SEQ ID NOS:4, 2806-2815, 3606-3626, and 3786-3798)
fas/Apo 1, SEQ ID NOS: 3287-3293.
mts-1, SEQ ID NOS: 2454-2472;
mts-2, SEQ ID NOS: 2100-2120;
NfκB, SEQ ID NOS: 1720-1739, 1741-1774, and 2166-2205;
WAF1 (p21), SEQ ID NOS: 2440-2453;
RB, (SEQ ID NOS: 400, 402, 404, 406, 408, 410, 411, 413, 415, 417 and 419);
ref-1, (SEQ ID NOS: 2657-2678);
c-myc, (SEQ ID NOS: 657-676);
n-myc, (SEQ ID NOS: 639-648);
SGP-2, (SEQ ID NOS: 3175-3197, 3746-3785) and
TRPM-2, (SEQ ID NOS: 3419-3483.

72. The method as claimed in claim 67 to claim 71, further comprising the step of assessing the oligonucleotide so identified for efficacy and toxicity in an in vivo animal model.

73. The method as claimed in claim 72, wherein said animal model is a non-human primate model for AIDS.

74. The method as claimed in claim 67, wherein disease is cancer and said modified NABT is assessed in an immunocompromised tumor bearing animal.

75. The method as claimed in claim 74, wherein said NABT targets at least one region in the p53 gene sequence.

76. The method as claimed in claim 67, wherein said NABT is selected from the group consisting of an antisense NABT, a modified antisense NABT, an siRNA NABT, a modified siRNA NABT, a ribozyme NABT, each of the NABT optionally being encoded by an expression vector suitable for expressing said NABT in a target cell.

77. The composition as claimed in claim 1, 2, or 3 wherein said NABT acts via a steric hindrance mechanism and also triggers RNAse H activity.

The application's sequence listing, which the Patent Office published only in electronic form, follows.

SEQUENCE LISTING (3801 sequences)

SEQ ID NO: 1 - DNA, 20 bp, Homo sapiens
agtcttgagcacatgggagg

SEQ ID NO: 2 - DNA, 20 bp, Homo sapiens
atctgactgcggctcctcca

SEQ ID NO: 3 - DNA, 20 bp, Homo sapiens
gacagcatcaaatcatccat

SEQ ID NO: 4 - DNA, 20 bp, Homo sapiens
ccctgctcccccctggctcc

SEQ ID NO: 5 - DNA, 16 bp, Homo sapiens
gtcggcgtggtggtga

SEQ ID NO: 6 - DNA, 20 bp, Homo sapiens
gctcgtcggcgtggtggtga

SEQ ID NO: 7 - DNA, 32 bp, Homo sapiens
cgtgccgggccggtttctgcgtgctgcgtgcg

SEQ ID NO: 8 - DNA, 22 bp, Homo sapiens
cggtttctgcgtgctgcgtgcg

SEQ ID NO: 9 - DNA, 22 bp, Homo sapiens
tggcgggccggtttctgcgtgc

SEQ ID NO: 10 - DNA, 24 bp, Homo sapiens
ggtccccaaaggtccccgaaagga

SEQ ID NO: 11 - DNA, 23 bp, Homo sapiens
ggtccccaaaggtccccgaaagg

SEQ ID NO: 12 - DNA, 38 bp, Homo sapiens
agctgttcgctgttttccctgtcacgccgcttttctga

SEQ ID NO: 13 - DNA, 22 bp, Homo sapiens
cgctgttttccctgtcacgccg

SEQ ID NO: 14 - DNA, 40 bp, Homo sapiens
cgctcctccgccacccccgtcgccgttgccatcgccaggg

SEQ ID NO: 15 - DNA, 22 bp, Homo sapiens
ccccgtcgccgttgccatcgcc

SEQ ID NO: 16 - DNA, 24 bp, Homo sapiens
gctcctccgccacccccgtcgccg

SEQ ID NO: 17 - DNA, 22 bp, Homo sapiens
ggaaggaggctaccccgagatc

SEQ ID NO: 18 - DNA, 39 bp, Homo sapiens
ggaggatggcgccgagggtggtggaaagcgcggcgaggc

SEQ ID NO: 19 - DNA, 23 bp, Homo sapiens
cgagggtggtggaaagcgcggcg

SEQ ID NO: 20 - DNA, 23 bp, Homo sapiens
tggcgccgagggtggtggaaagc

SEQ ID NO: 21 - DNA, 38 bp, Homo sapiens
gggtcggcggctccagcaacagcagcggccggaggacg

SEQ ID NO: 22 - DNA, 22 bp, Homo sapiens
caacagcagcggccggaggacg

SEQ ID NO: 23 - DNA, 23 bp, Homo sapiens
cggcggctccagcaacagcagcg

SEQ ID NO: 24 - DNA, 30 bp, Homo sapiens
gctctgcgcacgcgcggcttcaggctgtcc

SEQ ID NO: 25 - DNA, 22 bp, Homo sapiens
ctgcgcacgcgcggcttcaggc

SEQ ID NO: 26 - DNA, 34 bp, Homo sapiens
ccgcggcgggcaacatatagggcggcggcgcggg

SEQ ID NO: 27 - DNA, 22 bp, Homo sapiens
acatatagggcggcggcgcggg

SEQ ID NO: 28 - DNA, 26 bp, Homo sapiens
cctgtggctgggcagcgcgtggcggc

SEQ ID NO: 29 - DNA, 22 bp, Homo sapiens
tggctgggcagcgcgtggcggc

SEQ ID NO: 30 - DNA, 32 bp, Homo sapiens
ggagaggacgccgggccgggagtagggtaggg

SEQ ID NO: 31 - DNA, 22 bp, Homo sapiens
ggacgccgggccgggagtaggg

SEQ ID NO: 32 - DNA, 29 bp, Homo sapiens
aggctttcctcctcgcatcagaaacgggt

SEQ ID NO: 33 - DNA, 24 bp, Homo sapiens
tttcctcctcgcatcagaaacggg

SEQ ID NO: 34 - DNA, 34 bp, Homo sapiens
caacagtggcataggctttcctcctcgcatcaga

SEQ ID NO: 35 - DNA, 23 bp, Homo sapiens
tggcataggctttcctcctcgca

SEQ ID NO: 36 - DNA, 33 bp, Homo sapiens
gaacaaggcggagttcactgctgtggacactca

SEQ ID NO: 37 - DNA, 24 bp, Homo sapiens
caaggcggagttcactgctgtgga

SEQ ID NO: 38 - DNA, 33 bp, Homo sapiens
aaatttcactacgagccccagcctgactgaact

SEQ ID NO: 39 - DNA, 25 bp, Homo sapiens
tcactacgagccccagcctgactga

SEQ ID NO: 40 - DNA, 26 bp, Homo sapiens
gccagggcatagccacaccactccat

SEQ ID NO: 41 - DNA, 25 bp, Homo sapiens
gccagggcatagccacaccactcca

SEQ ID NO: 42 - DNA, 50 bp, Homo sapiens
aacaaaacgtgaagaaagcaaaagccgcgccttggacagaccagctggcc

SEQ ID NO: 43 - DNA, 22 bp, Homo sapiens
gccgcgccttggacagaccagc

SEQ ID NO: 44 - DNA, 23 bp, Homo sapiens
aagcaaaagccgcgccttggaca

SEQ ID NO: 45 - DNA, 23 bp, Homo sapiens
cgtgaagaaagcaaaagccgcgc

SEQ ID NO: 46 - DNA, 32 bp, Homo sapiens
tcaatgagccatccctaagttcgctgcctggg

SEQ ID NO: 47 - DNA, 22 bp, Homo sapiens
gccatccctaagttcgctgcct

SEQ ID NO: 48 - DNA, 34 bp, Homo sapiens
gctggagcttgcgccgccctccgtccagaaaatg

SEQ ID NO: 49 - DNA, 22 bp, Homo sapiens
gcttgcgccgccctccgtccag

SEQ ID NO: 50 - DNA, 32 bp, Homo sapiens
tccgccgcgagccctgccccaacaccccctct

SEQ ID NO: 51 - DNA, 22 bp, Homo sapiens
gcgagccctgccccaacacccc

SEQ ID NO: 52 - DNA, 24 bp, Homo sapiens
tgctcccgcaccacgcccagcagg

SEQ ID NO: 53 - DNA, 22 bp, Homo sapiens
ctcccgcaccacgcccagcagg

SEQ ID NO: 54 - DNA, 31 bp, Homo sapiens
ccccacctagccacccaccccaccccatcca

SEQ ID NO: 55 - DNA, 22 bp, Homo sapiens
gccacccaccccaccccatcca

SEQ ID NO: 56 - DNA, 31 bp, Homo sapiens
agccagctccgaaacccgaaatccgcctccg

SEQ ID NO: 57 - DNA, 22 bp, Homo sapiens
cgaaacccgaaatccgcctccg

SEQ ID NO: 58 - DNA, 24 bp, Homo sapiens
gccactcccgcctgacgcccccca

SEQ ID NO: 59 - DNA, 22 bp, Homo sapiens
gccactcccgcctgacgccccc

SEQ ID NO: 60 - DNA, 29 bp, Homo sapiens
agtctgggactcgggactcgggctgcgcc

SEQ ID NO: 61 - DNA, 22 bp, Homo sapiens
gggactcgggactcgggctgcg

SEQ ID NO: 62 - DNA, 41 bp, Homo sapiens
  misc_feature 5-7, 15: n= a, c, g, or t
ggagnnnagccccgncccagcccccacccagacggacccga

SEQ ID NO: 63 - DNA, 22 bp, Homo sapiens
gcccccacccagacggacccga

SEQ ID NO: 64 - DNA, 46 bp, Homo sapiens
  misc_feature 11, 33: n= a, c, g, or t
aaaaaacaagnaagcctggagcgcccgtctacnccgccgcccgagc

SEQ ID NO: 65 - DNA, 22 bp, Homo sapiens
  misc_feature 12: n= a, c, g, or t
cgcccgtctacnccgccgcccg

SEQ ID NO: 66 - DNA, 32 bp, Homo sapiens
gcaaccgtgccgtgggcttgctggtgccgtcg

SEQ ID NO: 67 - DNA, 22 bp, Homo sapiens
tgccgtcccgttgctggtgccg

SEQ ID NO: 68 - DNA, 30 bp, Homo sapiens
cctgggtgctgcggctgcggctgggcgtgc

SEQ ID NO: 69 - DNA, 22 bp, Homo sapiens
ctgcggctgcggctgggcgtgc

SEQ ID NO: 70 - DNA, 29 bp, Homo sapiens
ggatcacccccaaatcctgcccgaccccg

SEQ ID NO: 71 - DNA, 22 bp, Homo sapiens
ccccaaatcctgcccgaccccg

SEQ ID NO: 72 - DNA, 39 bp, Homo sapiens
tggctctacgctcttctccccgccccctttccttcccgc

SEQ ID NO: 73 - DNA, 22 bp, Homo sapiens
ccccgccccctttccttcccgc

SEQ ID NO: 74 - DNA, 23 bp, Homo sapiens
  misc_feature 3: n= a, c, g, or t
gcnccgcatcgcccgctcccccg

SEQ ID NO: 75 - DNA, 20 bp, Homo sapiens
ccgcatcgcccgctcccccg

SEQ ID NO: 76 - DNA, 33 bp, Homo sapiens
gcggcggcggcggcagcagcagcagcagtagca

SEQ ID NO: 77 - DNA, 22 bp, Homo sapiens
cggcggcagcagcagcagcagt

SEQ ID NO: 78 - DNA, 27 bp, Homo sapiens
gggacccaagggcagcggcggcggcgg

SEQ ID NO: 79 - DNA, 22 bp, Homo sapiens
gggacccaagggcagcggcggc

SEQ ID NO: 80 - DNA, 25 bp, Homo sapiens
ccacccctgggccccgagcgcttgg

SEQ ID NO: 81 - DNA, 22 bp, Homo sapiens
ccacccctgggccccgagcgct

SEQ ID NO: 82 - DNA, 43 bp, Homo sapiens
gcctctgcgaaagtgaaatgcccaagcctcgcgcaaagcccag

SEQ ID NO: 83 - DNA, 22 bp, Homo sapiens
gcccaagcctcgcgcaaagccc

SEQ ID NO: 84 - DNA, 22 bp, Homo sapiens
cccgttcccgttggctggccgc

SEQ ID NO: 85 - DNA, 41 bp, Homo sapiens
cgatctcccgccgaatccgccgctcctggtcccgctgagtc

SEQ ID NO: 86 - DNA, 22 bp, Homo sapiens
ccgccgctcctggtcccgctga

SEQ ID NO: 87 - DNA, 22 bp, Homo sapiens
ccgccgaatccgccgctcctgg

SEQ ID NO: 88 - DNA, 41 bp, Homo sapiens
gcctatgccttcgtccttgtcctctgcccgccgtcgcttgg

SEQ ID NO: 89 - DNA, 22 bp, Homo sapiens
tcctctgcccgccgtcgcttgg

SEQ ID NO: 90 - DNA, 50 bp, Homo sapiens
cgcagctcaatcatctcccgccgcaggtcctccgccttctcgtcctccca

SEQ ID NO: 91 - DNA, 22 bp, Homo sapiens
tcccgccgcaggtcctccgcct

SEQ ID NO: 92 - DNA, 23 bp, Homo sapiens
tcctccgccttctcgtcctccca

SEQ ID NO: 93 - DNA, 38 bp, Homo sapiens
attgatgtggtgggagggaggaggaggcggtgctggca

SEQ ID NO: 94 - DNA, 22 bp, Homo sapiens
ggaggaggaggcggtgctggca

SEQ ID NO: 95 - DNA, 24 bp, Homo sapiens
agctcgccgctgctcctcctccag

SEQ ID NO: 96 - DNA, 22 bp, Homo sapiens
gctcgccgctgctcctcctcca

SEQ ID NO: 97 - DNA, 31 bp, Homo sapiens
cctcggagtcggaggcggtgtcagaggtggg

SEQ ID NO: 98 - DNA, 22 bp, Homo sapiens
tcggaggcggtgtcagaggtgg

SEQ ID NO: 99 - DNA, 26 bp, Homo sapiens
gcccccagaatgccccagcctagtct

SEQ ID NO: 100 - DNA, 22 bp, Homo sapiens
gcccccagaatgccccagccta

SEQ ID NO: 101 - DNA, 44 bp, Homo sapiens
gagcttttccgggtacatgtgggcctccagcgagcgcacctgct

SEQ ID NO: 102 - DNA, 22 bp, Homo sapiens
gggcctccagcgagcgcacctg

SEQ ID NO: 103 - DNA, 22 bp, Homo sapiens
tccgggtacatgtgggcctcca

SEQ ID NO: 104 - DNA, 42 bp, Homo sapiens
ttcgcccatgtctctccctgtggctgccccggctccctccag

SEQ ID NO: 105 - DNA, 22 bp, Homo sapiens
ccctgtggctgccccggctccc

SEQ ID NO: 106 - DNA, 37 bp, Homo sapiens
ccgatgctcccacagctctgcgacaccccagccccgg

SEQ ID NO: 107 - DNA, 22 bp, Homo sapiens
gctctgcgacaccccagccccg

SEQ ID NO: 108 - DNA, 34 bp, Homo sapiens
gtcttttgaccaccccccacagtccccaggaagg

SEQ ID NO: 109 - DNA, 22 bp, Homo sapiens
ccaccccccacagtccccagga

SEQ ID NO: 110 - DNA, 26 bp, Homo sapiens
ccaggcacagcagggcagagggagga

SEQ ID NO: 111 - DNA, 23 bp, Homo sapiens
ccaggcacagcagggcagaggga

SEQ ID NO: 112 - DNA, 29 bp, Homo sapiens
gctccccctgtcccgccccctcccccagg

SEQ ID NO: 113 - DNA, 21 bp, Homo sapiens
tgtcccgccccctcccccagg

SEQ ID NO: 114 - DNA, 46 bp, Homo sapiens
gaggcccctgagctcatccccgtgcccccgactgcgcttctcaccg

SEQ ID NO: 115 - DNA, 22 bp, Homo sapiens
cccccgactgcgcttctcaccg

SEQ ID NO: 116 - DNA, 22 bp, Homo sapiens
tccccgtgcccccgactgcgct

SEQ ID NO: 117 - DNA, 63 bp, Homo sapiens
tccagtcccctgctgcttgcctcacccccgctcctcctctccccaagcccgaccccgagtagc

SEQ ID NO: 118 - DNA, 22 bp, Homo sapiens
cctctccccaagcaagaccccg

SEQ ID NO: 119 - DNA, 22 bp, Homo sapiens
cccccgctcctcctctccccaa

SEQ ID NO: 120 - DNA, 23 bp, Homo sapiens
cctgctgcttgcctcacccccgc

SEQ ID NO: 121 - DNA, 34 bp, Homo sapiens
ccaccttctagcgggtcgggtcgtctctgctgcc

SEQ ID NO: 122 - DNA, 24 bp, Homo sapiens
gcgggtcgggtcgtctctgctgcc

SEQ ID NO: 123 - DNA, 37 bp, Homo sapiens
ggctagctaccgtgtcgctgcccctggctccccagtt

SEQ ID NO: 124 - DNA, 22 bp, Homo sapiens
tgtcgctgcccctggctcccca

SEQ ID NO: 125 - DNA, 39 bp, Homo sapiens
ttcaaattccatccccccaccccctccccaccgccggtt

SEQ ID NO: 126 - DNA, 22 bp, Homo sapiens
cccaccccctccccaccgccgg

SEQ ID NO: 127 - DNA, 37 bp, Homo sapiens
ttctcttatctccccatccccaggtcggcctccatag

SEQ ID NO: 128 - DNA, 22 bp, Homo sapiens
ccccatccccaggtcggcctcc

SEQ ID NO: 129 - DNA, 44 bp, Homo sapiens
atcccagcacatttaccaagccgcccccaacccattccctattt

SEQ ID NO: 130 - DNA, 22 bp, Homo sapiens
aagccgcccccaacccattccc

SEQ ID NO: 131 - DNA, 23 bp, Homo sapiens
gcacatttaccaagccgccccca

SEQ ID NO: 132 - DNA, 35 bp, Homo sapiens
ggaaccgagcaagccccgcccccatacctgccagg

SEQ ID NO: 133 - DNA, 22 bp, Homo sapiens
agccccgcccccatacctgcca

SEQ ID NO: 134 - DNA, 22 bp, Homo sapiens
aaccgagcaagccccgccccca

SEQ ID NO: 135 - DNA, 39 bp, Homo sapiens
ggtccggctgcccatctcctccatccgcgcgcgcagccg

SEQ ID NO: 136 - DNA, 22 bp, Homo sapiens
cctccatccgcgcgcgcagccg

SEQ ID NO: 137 - DNA, 23 bp, Homo sapiens
gcccatctcctccatccgcgcgc

SEQ ID NO: 138 - DNA, 22 bp, Homo sapiens
ggtccggctgcccatctcctcc

SEQ ID NO: 139 - DNA, 40 bp, Homo sapiens
accccatctccacacacaccacccccccccaaattaatcc

SEQ ID NO: 140 - DNA, 22 bp, Homo sapiens
ccacacacaccaccccccccca

SEQ ID NO: 141 - DNA, 50 bp, Homo sapiens
agtgaggactcctcccacccccagcgcccccaacccggcctcaccccagg

SEQ ID NO: 142 - DNA, 22 bp, Homo sapiens
cccccaacccggcctcacccca

SEQ ID NO: 143 - DNA, 22 bp, Homo sapiens
acccccagcgcccccaacccgg

SEQ ID NO: 144 - DNA, 39 bp, Homo sapiens
ccactcggtctgctggcgcagctcgggctccggctctgt

SEQ ID NO: 145 - DNA, 22 bp, Homo sapiens
ctggcgcagctcgggctccggc

SEQ ID NO: 146 - DNA, 31 bp, Homo sapiens
ccagcactttgggaggccgaggcgggaggat

SEQ ID NO: 147 - DNA, 22 bp, Homo sapiens
ttgggaggccgaggcgggagga

SEQ ID NO: 148 - DNA, 40 bp, Homo sapiens
gacgaagaaggagctaggaggccgggcaaggtgctcatgc

SEQ ID NO: 149 - DNA, 23 bp, Homo sapiens
ggaggccgggcaaggtgctcatg

SEQ ID NO: 150 - DNA, 46 bp, Homo sapiens
tgcgccgcctgcagctccttggacagccgtgcccgcgtctcctccg

SEQ ID NO: 151 - DNA, 22 bp, Homo sapiens
agccgtgcccgcgtctcctccg

SEQ ID NO: 152 - DNA, 22 bp, Homo sapiens
tccttggacagccgtgcccgcg

SEQ ID NO: 153 - DNA, 37 bp, Homo sapiens
tgctcagacagtgtctgcacccagcgcaggtaatccc

SEQ ID NO: 154 - DNA, 22 bp, Homo sapiens
gcaccaggcggccgcgcacgtc

SEQ ID NO: 155 - DNA, 29 bp, Homo sapiens
ccctcgcgggccccggcctggtacactgc

SEQ ID NO: 156 - DNA, 22 bp, Homo sapiens
ccctcgcgggccccggcctggt

SEQ ID NO: 157 - DNA, 25 bp, Homo sapiens
cccgcacgcgcccctgttccaccag

SEQ ID NO: 158 - DNA, 22 bp, Homo sapiens
cgcacgcggccctgttccacca

SEQ ID NO: 159 - DNA, 37 bp, Homo sapiens
acctgctccttcacctcgtccaggcggtcgcgggtcc

SEQ ID NO: 160 - DNA, 22 bp, Homo sapiens
tcgtccaggcggtcgcgggtcc

SEQ ID NO: 161 - DNA, 38 bp, Homo sapiens
ctgctgggcctgctcctccagcttggcgcgcacctccg

SEQ ID NO: 162 - DNA, 22 bp, Homo sapiens
tccagcttggcgcgcacctccg

SEQ ID NO: 163 - DNA, 50 bp, Homo sapiens
ggcagcctgcaccttctccaccagcccggcccactggcgctgcatgtctt

SEQ ID NO: 164 - DNA, 22 bp, Homo sapiens
cccggcccactggcgctgcatg

SEQ ID NO: 165 - DNA, 22 bp, Homo sapiens
ccttctccaccagcccggccca

SEQ ID NO: 166 - DNA, 23 bp, Homo sapiens
tgcgcggaggcaggaggcacggg

SEQ ID NO: 167 - DNA, 22 bp, Homo sapiens
gcgcggaggcaggaggcacggg

SEQ ID NO: 168 - DNA, 46 bp, Homo sapiens
taatctcagcactttgggaggccggcgggtggatcacttggtcagg

SEQ ID NO: 169 - DNA, 22 bp, Homo sapiens
ggccggcgggtggatcacttgg

SEQ ID NO: 170 - DNA, 23 bp, Homo sapiens
cagcactttgggaggccggcggg

SEQ ID NO: 171 - DNA, 22 bp, Homo sapiens
gggcagaggccgggcatggtgg

SEQ ID NO: 172 - DNA, 33 bp, Homo sapiens
ccagcactttgggaggccgatggcggaggatct

SEQ ID NO: 173 - DNA, 22 bp, Homo sapiens
ttgggaggccgatggcggagga

SEQ ID NO: 174 - DNA, 45 bp, Homo sapiens
gccgctcggagcccatgcctggaatcccagcactttgggaggccg

SEQ ID NO: 175 - DNA, 22 bp, Homo sapiens
gccgctcggagcccatgcctgg

SEQ ID NO: 176 - DNA, 32 bp, Homo sapiens
gggaaaacagagggttctctccgccggaattc

SEQ ID NO: 177 - DNA, 22 bp, Homo sapiens
agggttctctccgccggaattc

SEQ ID NO: 178 - DNA, 37 bp, Homo sapiens
cacctacttcccttaccccgcctccccttctcttgct

SEQ ID NO: 179 - DNA, 22 bp, Homo sapiens
accccgcctccccttctcttgc

SEQ ID NO: 180 - DNA, 35 bp, Homo sapiens
aggcctccctcgctctcccgctgctgctgccttcg

SEQ ID NO: 181 - DNA, 22 bp, Homo sapiens
tcgctctcccgctgctgctgcc

SEQ ID NO: 182 - DNA, 26 bp, Homo sapiens
gctacagcttccgcctcgccgccgcc

SEQ ID NO: 183 - DNA, 22 bp, Homo sapiens
acagcttccgcctcgccgccgc

SEQ ID NO: 184 - DNA, 41 bp, Homo sapiens
ccgccgccgccgccaccaccacccccaccaccaccacacgg

SEQ ID NO: 185 - DNA, 22 bp, Homo sapiens
gccgccgccaccaccaccccca

SEQ ID NO: 186 - DNA, 22 bp, Homo sapiens
gccaccaccacccccaccacca

SEQ ID NO: 187 - DNA, 34 bp, Homo sapiens
gccgggaggtgctgcgctcgcggcctctgggtgc

SEQ ID NO: 188 - DNA, 22 bp, Homo sapiens
gctgcgctcgcggcctctgggt

SEQ ID NO: 189 - DNA, 22 bp, Homo sapiens
ccgggaggtgctgcgctcgcgg

SEQ ID NO: 190 - DNA, 44 bp, Homo sapiens
ggaaagctcctcggtaggtcttggacggcggccgagggtagacc

SEQ ID NO: 191 - DNA, 22 bp, Homo sapiens
ggtcttggacggcggccgaggg

SEQ ID NO: 192 - DNA, 26 bp, Homo sapiens
ccatgcaggctcgccaggtccccata

SEQ ID NO: 193 - DNA, 22 bp, Homo sapiens
atgcaggctcgccaggtcccca

SEQ ID NO: 194 - DNA, 28 bp, Homo sapiens
catcattttgctccaggctccgctcggg

SEQ ID NO: 195 - DNA, 22 bp, Homo sapiens
tttgctccaggctccgctcggg

SEQ ID NO: 196 - DNA, 45 bp, Homo sapiens
attcaatgaggactccccagtcgcccccataccacgactgcttag

SEQ ID NO: 197 - DNA, 22 bp, Homo sapiens
ccccagtcgcccccataccacg

SEQ ID NO: 198 - DNA, 20 bp, Homo sapiens
tgagatactgcacgtggtga

SEQ ID NO: 199 - DNA, 11 bp, Homo sapiens
cagccccgccc

SEQ ID NO: 200 - DNA, 22 bp, Homo sapiens
gcacgtggtgacagccccgccc

SEQ ID NO: 201 - DNA, 43 bp, Homo sapiens
atgatgactgagtcagttcgggctgggccaaatttcaatgtca

SEQ ID NO: 202 - DNA, 22 bp, Homo sapiens
tgagtcagttcgggctgggcca

SEQ ID NO: 203 - DNA, 26 bp, Homo sapiens
gcccagcagcagccaccagttttttg

SEQ ID NO: 204 - DNA, 22 bp, Homo sapiens
gcccagcagcagccaccagttt

SEQ ID NO: 205 - DNA, 31 bp, Homo sapiens
ctggatcttcatctactgtgcgccgccgtcg

SEQ ID NO: 206 - DNA, 22 bp, Homo sapiens
catctactgtgcgccgccgtcg

SEQ ID NO: 207 - DNA, 33 bp, Homo sapiens
gcggtgtgccaatgccagagcccccgacttcag

SEQ ID NO: 208 - DNA, 22 bp, Homo sapiens
tgtgccaatgccagagcccccg

SEQ ID NO: 209 - DNA, 33 bp, Homo sapiens
actttgttgttagcaccaggagccgcccacagc

SEQ ID NO: 210 - DNA, 22 bp, Homo sapiens
agcaccaggagccgcccacagc

SEQ ID NO: 211 - DNA, 32 bp, Homo sapiens
cagatgatgcggtcctcctcctcggtccagca

SEQ ID NO: 212 - DNA, 22 bp, Homo sapiens
tgcggtcctcctcctcggtcca

SEQ ID NO: 213 - DNA, 34 bp, Homo sapiens
gttcagaaactgggagggcgagaagggcagggtc

SEQ ID NO: 214 - DNA, 22 bp, Homo sapiens
tgggagggcgagaagggcaggg

SEQ ID NO: 215 - DNA, 35 bp, Homo sapiens
gcatgaaaagctggtccctggtccccccgcaggcc

SEQ ID NO: 216 - DNA, 22 bp, Homo sapiens
gctggtccctggtccccccgca

SEQ ID NO: 217 - DNA, 42 bp, Homo sapiens
ggtatcgcgtccccaccgtgcagcctccccccgccttccgag

SEQ ID NO: 218 - DNA, 22 bp, Homo sapiens
gcagcctccccccgccttccga

SEQ ID NO: 219 - DNA, 37 bp, Homo sapiens
ctcaagaccaggcccccaatcaacaccagccccacgg

SEQ ID NO: 220 - DNA, 22 bp, Homo sapiens
gcccccaatcaacaccagcccc

SEQ ID NO: 221 - DNA, 52 bp, Homo sapiens
ctcttctgtgtcaaagttgttccggttgccgccacatccgccgtaaaagaat

SEQ ID NO: 222 - DNA, 22 bp, Homo sapiens
ggttgccgccacatccgccgta

SEQ ID NO: 223 - DNA, 48 bp, Homo sapiens
gagtggactgtcctcggtcggcagcagggcgggcatcaacaggctcaa

SEQ ID NO: 224 - DNA, 22 bp, Homo sapiens
ctcggtcggcagcagggcgggc

SEQ ID NO: 225 - DNA, 23 bp, Homo sapiens
cgtgctctcgcctaccgctgccg

SEQ ID NO: 226 - DNA, 24 bp, Homo sapiens
cgccgccaccgccgccgtctcccg

SEQ ID NO: 227 - DNA, 21 bp, Homo sapiens
ccgccaccgccgccgtctccg

SEQ ID NO: 228 - DNA, 42 bp, Homo sapiens
catagtctgtgtctgctccgccccaccagacatccgagtcat

SEQ ID NO: 229 - DNA, 22 bp, Homo sapiens
gctccgccccaccagacatccg

SEQ ID NO: 230 - DNA, 48 bp, Homo sapiens
gagtggtcagtcctcggtcggcagcagggcgggcatcaacaggctcaa

SEQ ID NO: 231 - DNA, 22 bp, Homo sapiens
tcggtcggcagcagggcgggca

SEQ ID NO: 232 - DNA, 48 bp, Homo sapiens
gtaattgaagaccagcagagcacccctccccacccgccccgtaaaagt

SEQ ID NO: 233 - DNA, 23 bp, Homo sapiens
gcacccctccccacccgccccgt

SEQ ID NO: 234 - DNA, 23 bp, Homo sapiens
gggcccccgcgcacgctcctccg

SEQ ID NO: 235 - DNA, 22 bp, Homo sapiens
ggcccccgcgcacgctcctccg

SEQ ID NO: 236 - DNA, 37 bp, Homo sapiens
gatccgccgcgtccttgctctgcccgcgccgccaccg

SEQ ID NO: 237 - DNA, 22 bp, Homo sapiens
tgctctgcccgcgccgccaccg

SEQ ID NO: 238 - DNA, 27 bp, Homo sapiens
ccaggcggcggcggtcattgagcatgg

SEQ ID NO: 239 - DNA, 22 bp, Homo sapiens
aggcggcggcggtcattgagca

SEQ ID NO: 240 - DNA, 29 bp, Homo sapiens
ggtgcctccccccccattcgccctgctcg

SEQ ID NO: 241 - DNA, 20 bp, Homo sapiens
ccccccattcgccctgctcg

SEQ ID NO: 242 - DNA, 22 bp, Homo sapiens
ggtgcctccccccccattcgcc

SEQ ID NO: 243 - DNA, 32 bp, Homo sapiens
gagtctgtgtccacggcggcaatcatcctctg

SEQ ID NO: 244 - DNA, 22 bp, Homo sapiens
ccacggcggcaatcatcctctg

SEQ ID NO: 245 - DNA, 33 bp, Homo sapiens
tcttcttccagatggtgagcgaggcggtgagca

SEQ ID NO: 246 - DNA, 22 bp, Homo sapiens
atggtgagcgaggcggtgagca

SEQ ID NO: 247 - DNA, 23 bp, Homo sapiens
ggctgctccccggacccgtccat

SEQ ID NO: 248 - DNA, 35 bp, Homo sapiens
cttcatgatctgctcagagctggtgggccccccgc

SEQ ID NO: 249 - DNA, 22 bp, Homo sapiens
tcagagctggtgggccccccgc

SEQ ID NO: 250 - DNA, 42 bp, Homo sapiens
ggacgcatcctgaggcaccgggtccagggccagctcgggtgc

SEQ ID NO: 251 - DNA, 22 bp, Homo sapiens
ggtccagggccagctcgggtgc

SEQ ID NO: 252 - DNA, 22 bp, Homo sapiens
caccgggtccagggccagctcg

SEQ ID NO: 253 - DNA, 29 bp, Homo sapiens
gctccatgttactgtccagttcgtccccg

SEQ ID NO: 254 - DNA, 22 bp, Homo sapiens
ccagttcgtccccgatgcgctt

SEQ ID NO: 255 - DNA, 35 bp, Homo sapiens
ggagcccagccccctctctcttgcacgccccttgg

SEQ ID NO: 256 - DNA, 22 bp, Homo sapiens
gccccctctctcttgcacgccc

SEQ ID NO: 257 - DNA, 33 bp, Homo sapiens
gccccctcgcttgcttcctcctccatcgcccgg

SEQ ID NO: 258 - DNA, 22 bp, Homo sapiens
tgcttcctcctccatcgcccgg

SEQ ID NO: 259 - DNA, 40 bp, Homo sapiens
atcttttgtatcacaggtcgggagaggaggtggctgcggg

SEQ ID NO: 260 - DNA, 22 bp, Homo sapiens
cgggagaggaggtggctgcggg

SEQ ID NO: 261 - DNA, 46 bp, Homo sapiens
gcagtcccccccgcccccactcccgctcccccgcaccacctacatt

SEQ ID NO: 262 - DNA, 22 bp, Homo sapiens
actcccgctcccccgcaccacc

SEQ ID NO: 263 - DNA, 23 bp, Homo sapiens
aaatgcgtggtttgtctgaattc

SEQ ID NO: 264 - DNA, 22 bp, Homo sapiens
cctgccacccgggagcccagcc

SEQ ID NO: 265 - DNA, 45 bp, Homo sapiens
gcccgccggtaccgcagttcaaactcgtcgcctgcctccctcagc

SEQ ID NO: 266 - DNA, 22 bp, Homo sapiens
ctcgtcgcctgcctccctcagc

SEQ ID NO: 267 - DNA, 44 bp, Homo sapiens
gtctacgctttccacgcacagtgccccgccgaaggagaaaaagg

SEQ ID NO: 268 - DNA, 22 bp, Homo sapiens
tccacgcacagtgccccgccga

SEQ ID NO: 269 - DNA, 27 bp, Homo sapiens
ccctttcggctctcggctgctgcattg

SEQ ID NO: 270 - DNA, 22 bp, Homo sapiens
tcggctctcggctgctgcattg

SEQ ID NO: 271 - DNA, 41 bp, Homo sapiens
cgactgaagagtgagcccagcagaaccacgccggccacagt

SEQ ID NO: 272 - DNA, 22 bp, Homo sapiens
ccagcagaaccacgccggccac

SEQ ID NO: 273 - DNA, 45 bp, Homo sapiens
cgggttctcctggtggcaatggcggctggacggaggatgtggtgg

SEQ ID NO: 274 - DNA, 22 bp, Homo sapiens
gcggctggacggaggatgtggt

SEQ ID NO: 275 - DNA, 22 bp, Homo sapiens
ggtggcaatggcggctggacgg

SEQ ID NO: 276 - DNA, 49 bp, Homo sapiens
ctctaggtggtcattcaggtaagtggccatccaagctgcgatccgactc

SEQ ID NO: 277 - DNA, 22 bp, Homo sapiens
ggccatccaagctgcgatccga

SEQ ID NO: 278 - DNA, 36 bp, Homo sapiens
gagctgggatgtcaggtcactgaatgcccgccggta

SEQ ID NO: 279 - DNA, 22 bp, Homo sapiens
caggtcactgaatgcccgccgg

SEQ ID NO: 280 - DNA, 25 bp, Homo sapiens
ccacggagagcggcgggcgggagcg

SEQ ID NO: 281 - DNA, 18 bp, Homo sapiens
ccacggagagcggcgggc

SEQ ID NO: 282 - DNA, 25 bp, Homo sapiens
gctggcagcggcggcggcggcagcg

SEQ ID NO: 283 - DNA, 22 bp, Homo sapiens
gctggcagcggcggcggcggca

SEQ ID NO: 284 - DNA, 44 bp, Homo sapiens
agctcgagtttttttttggcagcggcggcggcagatgaattaca

SEQ ID NO: 285 - DNA, 22 bp, Homo sapiens
tggcagcggcggcggcagatga

SEQ ID NO: 286 - DNA, 41 bp, Homo sapiens
gcgcggcgcccacatctcccgcatcccactcgtagcccctc

SEQ ID NO: 287 - DNA, 22 bp, Homo sapiens
cccgcatcccactcgtagcccc

SEQ ID NO: 288 - DNA, 22 bp, Homo sapiens
cgcccacatctcccgcatccca

SEQ ID NO: 289 - DNA, 20 bp, Homo sapiens
gcgcggcgcccacatctccc

SEQ ID NO: 290 - DNA, 25 bp, Homo sapiens
gcggtagcggcgggagaagtcgtcg

SEQ ID NO: 291 - DNA, 22 bp, Homo sapiens
gcggtagcggcgggagaagtcg

SEQ ID NO: 292 - DNA, 31 bp, Homo sapiens
ccgcggaaggagggcaggagggctctgggtg

SEQ ID NO: 293 - DNA, 22 bp, Homo sapiens
cgcggaaggagggcaggagggc

SEQ ID NO: 294 - DNA, 27 bp, Homo sapiens
cggagccccggcaccttcgctggcagc

SEQ ID NO: 295 - DNA, 22 bp, Homo sapiens
ccccggcaccttcgctggcagc

SEQ ID NO: 296 - DNA, 35 bp, Homo sapiens
accctttctcctcctcctggtcctgcgcggcggcg

SEQ ID NO: 297 - DNA, 22 bp, Homo sapiens
cctcctggtcctgcgcggcggc

SEQ ID NO: 298 - DNA, 36 bp, Homo sapiens
ctatccacgggaccgcttcacgcctccccaggagag

SEQ ID NO: 299 - DNA, 22 bp, Homo sapiens
accgcttcacgcctccccagga

SEQ ID NO: 300 - DNA, 22 bp, Homo sapiens
ccacgggaccgcttcacgcctc

SEQ ID NO: 301 - DNA, 44 bp, Homo sapiens
gcacctctcgccccagctcccaccccacggcccccagagaaaga

SEQ ID NO: 302 - DNA, 22 bp, Homo sapiens
cgccccagctcccaccccacgg

SEQ ID NO: 303 - DNA, 22 bp, Homo sapiens
cccaccccacggcccccagaga

SEQ ID NO: 304 - DNA, 45 bp, Homo sapiens
gttgtcgtaccccgttctcccagcgtgcgccatccttcccagagg

SEQ ID NO: 305 - DNA, 22 bp, Homo sapiens
cccagcgtgcgccatccttccc

SEQ ID NO: 306 - DNA, 28 bp, Homo sapiens
gggtctgcagcggcgaggtcctggcgac

SEQ ID NO: 307 - DNA, 22 bp, Homo sapiens
tgcagcggcgaggtcctggcga

SEQ ID NO: 308 - DNA, 34 bp, Homo sapiens
gtggaccacaggtggcaccgggctgagcgcaggc

SEQ ID NO: 309 - DNA, 22 bp, Homo sapiens
tggcaccgggctgagcgcaggc

SEQ ID NO: 310 - DNA, 26 bp, Homo sapiens
caccaccgtggcaaagcgtccccgcg

SEQ ID NO: 311 - DNA, 22 bp, Homo sapiens
accgtggcaaagcgtccccgcg

SEQ ID NO: 312 - DNA, 26 bp, Homo sapiens
tcattctgttccctgaggcccgccgg

SEQ ID NO: 313 - DNA, 22 bp, Homo sapiens
tctgttccctgaggcccgccgg

SEQ ID NO: 314 - DNA, 32 bp, Homo sapiens
tcccattgcccaggagcccacccgcactccaa

SEQ ID NO: 315 - DNA, 22 bp, Homo sapiens
cccacccgcactccaacccccg

SEQ ID NO: 316 - DNA, 22 bp, Homo sapiens
ttgcccaggagcccacccgcac

SEQ ID NO: 317 - DNA, 28 bp, Homo sapiens
aggtagggacacgccgggaagcaacaac

SEQ ID NO: 318 - DNA, 22 bp, Homo sapiens
gggacacgccgggaagcaacaa

SEQ ID NO: 319 - DNA, 34 bp, Homo sapiens
actggaagctgggactggttggttgggtggctgc

SEQ ID NO: 320 - DNA, 22 bp, Homo sapiens
tgggactggttggttgggtggc

SEQ ID NO: 321 - DNA, 44 bp, Homo sapiens
tgaatactctgtggtctgctcgggcttgatgggctctgtggtgg

SEQ ID NO: 322 - DNA, 22 bp, Homo sapiens
ggtctgctcgggcttgatgggc

SEQ ID NO: 323 - DNA, 34 bp, Homo sapiens
gccttcatgtcgtccagcccaccagccagcgagg

SEQ ID NO: 324 - DNA, 22 bp, Homo sapiens
cgtccagcccaccagccagcga

SEQ ID NO: 325 - DNA, 21 bp, Homo sapiens
gggcggctcctcgggcggcac

SEQ ID NO: 326 - DNA, 21 bp, Homo sapiens
gggcggctcctcgggcggcag

SEQ ID NO: 327 - DNA, 32 bp, Homo sapiens
gggtcagtgacggtcataggcagtggcggctg

SEQ ID NO: 328 - DNA, 22 bp, Homo sapiens
cggtcataggcagtggcggctg

SEQ ID NO: 329 - DNA, 23 bp, Homo sapiens
gccccagccccagcacctccatg

SEQ ID NO: 330 - DNA, 22 bp, Homo sapiens
gccccagccccagcacctccat

SEQ ID NO: 331 - DNA, 39 bp, Homo sapiens
gatcagatgatctcctgcgtcccatccagccctcacatt

SEQ ID NO: 332 - DNA, 22 bp, Homo sapiens
tgcgtcccatccagccctcaca

SEQ ID NO: 333 - DNA, 30 bp, Homo sapiens
ggtaaagagatgatggcacctggcaccccc

SEQ ID NO: 334 - DNA, 22 bp, Homo sapiens
gatgatggcacctggcaccccc

SEQ ID NO: 335 - DNA, 32 bp, Homo sapiens
gcctcaggtgcccacccccatctgcttgcttg

SEQ ID NO: 336 - DNA, 22 bp, Homo sapiens
tgcccacccccatctgcttgct

SEQ ID NO: 337 - DNA, 24 bp, Homo sapiens
gcccagccccgccgccttttctag

SEQ ID NO: 338 - DNA, 22 bp, Homo sapiens
gcccagccccgccgccttttct

SEQ ID NO: 339 - DNA, 26 bp, Homo sapiens
cgccgcccgccttgtgattgctgttg

SEQ ID NO: 340 - DNA, 22 bp, Homo sapiens
cgccgcccgccttgtgattgct

SEQ ID NO: 341 - DNA, 44 bp, Homo sapiens
acctggcgcccgggctccctaggtgctggctggctgcggtccgg

SEQ ID NO: 342 - DNA, 22 bp, Homo sapiens
aggtgctggctggctgcggtcc

SEQ ID NO: 343 - DNA, 36 bp, Homo sapiens
atccccccgccccccccacacacacacctggcgccc

SEQ ID NO: 344 - DNA, 22 bp, Homo sapiens
gccccccccacacacacacctg

SEQ ID NO: 345 - DNA, 39 bp, Homo sapiens
cgggccgtcgggtctgaggtatgggtcgttgctgagtct

SEQ ID NO: 346 - DNA, 22 bp, Homo sapiens
cgggccgtcgggtctgaggtat

SEQ ID NO: 347 - DNA, 30 bp, Homo sapiens
gctcagagcaagtcccgagcccccgagccg

SEQ ID NO: 348 - DNA, 22 bp, Homo sapiens
caagtcccgagcccccgagccg

SEQ ID NO: 349 - DNA, 39 bp, Homo sapiens
gggattgccgctttctgccacctccccgaagaagccagg

SEQ ID NO: 350 - DNA, 22 bp, Homo sapiens
ccgctttctgccacctccccga

SEQ ID NO: 351 - DNA, 36 bp, Homo sapiens
gaagcagaccttcatcccctaacctccagccctcgg

SEQ ID NO: 352 - DNA, 22 bp, Homo sapiens
tcccctaacctccagccctcgg

SEQ ID NO: 353 - DNA, 38 bp, Homo sapiens
tatcaatgaaactgccttacacacccgcccgctgcacc

SEQ ID NO: 354 - DNA, 22 bp, Homo sapiens
gccttacacacccgcccgctgc

SEQ ID NO: 355 - DNA, 47 bp, Homo sapiens
tcctcatccgttccaccttgcccctcctgccaatgctctgcgctcgg

SEQ ID NO: 356 - DNA, 22 bp, Homo sapiens
cccctcctgccaatgctctgcg

SEQ ID NO: 357 - DNA, 30 bp, Homo sapiens
gcttcccacccagcccccacattcccagga

SEQ ID NO: 358 - DNA, 22 bp, Homo sapiens
cccacccagcccccacattccc

SEQ ID NO: 359 - DNA, 30 bp, Homo sapiens
ggctcattgctgctgctgcccttgcggtgg

SEQ ID NO: 360 - DNA, 22 bp, Homo sapiens
gctgctgctgcccttgcggtgg

SEQ ID NO: 361 - DNA, 34 bp, Homo sapiens
gagcaactttttctcccccacttccgcccactat

SEQ ID NO: 362 - DNA, 22 bp, Homo sapiens
ttttctcccccacttccgccca

SEQ ID NO: 363 - DNA, 25 bp, Homo sapiens
cgcgagcagaggcagaagggcggtc

SEQ ID NO: 364 - DNA, 21 bp, Homo sapiens
gcgagcagaggcagaagggcg

SEQ ID NO: 365 - DNA, 32 bp, Homo sapiens
cgcacgcacccgctggctgtcgtccccgctgc

SEQ ID NO: 366 - DNA, 22 bp, Homo sapiens
cgcacgcacccgctggctgtcg

SEQ ID NO: 367 - DNA, 22 bp, Homo sapiens
cgctggctgtcgtccccgctgc

SEQ ID NO: 368 - DNA, 31 bp, Homo sapiens
gccgccgctgccgctgccccctgccaccgag

SEQ ID NO: 369 - DNA, 22 bp, Homo sapiens
tgccgctgccccctgccaccga

SEQ ID NO: 370 - DNA, 32 bp, Homo sapiens
caggtggtgcggcggctgctgctgctgctggg

SEQ ID NO: 371 - DNA, 22 bp, Homo sapiens
tggtgcggcggctgctgctgct

SEQ ID NO: 372 - DNA, 32 bp, Homo sapiens
ttttttcttcgttgcccctcagcccccgacgg

SEQ ID NO: 373 - DNA, 22 bp, Homo sapiens
cttcgttgcccctcagcccccg

SEQ ID NO: 374 - DNA, 57 bp, Homo sapiens
gctctcacaaacctccctcctgccgcccctccccaaccctccccccgctttgtgttc

SEQ ID NO: 375 - DNA, 22 bp, Homo sapiens
ccccaaccctccccccgctttg

SEQ ID NO: 376 - DNA, 22 bp, Homo sapiens
caaacctccctcctgccgcccc

SEQ ID NO: 377 - DNA, 27 bp, Homo sapiens
cgcacctccactcccgcctcgctgctt

SEQ ID NO: 378 - DNA, 22 bp, Homo sapiens
cgcacctccactcccgcctcgc

SEQ ID NO: 379 - DNA, 33 bp, Homo sapiens
gcgtggggtaccgctgctttccgccgctgtcaa

SEQ ID NO: 380 - DNA, 22 bp, Homo sapiens
ccgctgctttccgccgctgtca

SEQ ID NO: 381 - DNA, 28 bp, Homo sapiens
gcggaggtgcggcttcaggctccccact

SEQ ID NO: 382 - DNA, 22 bp, Homo sapiens
aggtgcggcttcaggctcccca

SEQ ID NO: 383 - DNA, 26 bp, Homo sapiens
ggtgccgcctcccgctgcccgccgcc

SEQ ID NO: 384 - DNA, 22 bp, Homo sapiens
ggtgccgcctcccgctgcccgc

SEQ ID NO: 385 - DNA, 26 bp, Homo sapiens
cactgctggctggctggcttttgaag

SEQ ID NO: 386 - DNA, 22 bp, Homo sapiens
tgctggctggctggcttttgaa

SEQ ID NO: 387 - DNA, 24 bp, Homo sapiens
ggcggagcctgagcaaaacccatc

SEQ ID NO: 388 - DNA, 22 bp, Homo sapiens
gcggagcctgagcaaaacccat

SEQ ID NO: 389 - DNA, 33 bp, Homo sapiens
ggccgcccgctcgctccctctgcctctcgctgg

SEQ ID NO: 390 - DNA, 22 bp, Homo sapiens
cgcccgctcgctccctctgcct

SEQ ID NO: 391 - DNA, 36 bp, Homo sapiens
taagttccagtgcaaagtgcccgcccgctgctatgg

SEQ ID NO: 392 - DNA, 22 bp, Homo sapiens
aagtgcccgcccgctgctatgg

SEQ ID NO: 393 - DNA, 46 bp, Homo sapiens
gcccaccgcaaagcaacccccagccccccaaaacccagagagcaat

SEQ ID NO: 394 - DNA, 22 bp, Homo sapiens
gcccaccgcaaagcaaccccca

SEQ ID NO: 395 - DNA, 37 bp, Homo sapiens
ggacacatcctcgcctcccttttcccctgcctgcgcc

SEQ ID NO: 396 - DNA, 22 bp, Homo sapiens
tcccttttcccctgcctgcgcc

SEQ ID NO: 397 - DNA, 44 bp, Homo sapiens
ggaaccgcccagagccccgctcctcgcagttcctccgcatctcg

SEQ ID NO: 398 - DNA, 22 bp, Homo sapiens
ggaaccgcccagagccccgctc

SEQ ID NO: 399 - DNA, 32 bp, Homo sapiens
caccgcagcccctcccaaccttccctctccac

SEQ ID NO: 400 - DNA, 22 bp, Homo sapiens
gcaccgcagcccctcccaacct

SEQ ID NO: 401 - DNA, 36 bp, Homo sapiens
ggagaagctcccgccaccgccgtcgttgtctccccg

SEQ ID NO: 402 - DNA, 22 bp, Homo sapiens
caccgccgtcgttgtctccccg

SEQ ID NO: 403 - DNA, 42 bp, Homo sapiens
ccactcttgaggcagttcactggctcccgcactcaggcaggc

SEQ ID NO: 404 - DNA, 22 bp, Homo sapiens
tggctcccgcactcaggcaggc

SEQ ID NO: 405 - DNA, 31 bp, Homo sapiens
ttttttcttttcccccacgccctctgctttg

SEQ ID NO: 406 - DNA, 22 bp, Homo sapiens
ttcccccacgccctctgctttg

SEQ ID NO: 407 - DNA, 31 bp, Homo sapiens
gaaaggtatccagccgcccacttttgacagg

SEQ ID NO: 408 - DNA, 22 bp, Homo sapiens
ccagccgcccacttttgacagg

SEQ ID NO: 409 - DNA, 32 bp, Homo sapiens
gcgccgtaaagcccgactccagccgaaaaggg

SEQ ID NO: 410 - DNA, 22 bp, Homo sapiens
gcccgactccagccgaaaaggg

SEQ ID NO: 411 - DNA, 22 bp, Homo sapiens
cgccgtaaagcccgactccagc

SEQ ID NO: 412 - DNA, 50 bp, Homo sapiens
tattcttatctctggccttgtaaacggtggcaaactgtccctccccaagg

SEQ ID NO: 413 - DNA, 22 bp, Homo sapiens
cggtggcaaactgtccctcccc

SEQ ID NO: 414 - DNA, 33 bp, Homo sapiens
tttaaagctaccttaaagcctccaaccccgccc

SEQ ID NO: 415 - DNA, 22 bp, Homo sapiens
cttaaagcctccaaccccgccc

SEQ ID NO: 416 - DNA, 29 bp, Homo sapiens
ggaacagggcccggcgagtcaccatctca

SEQ ID NO: 417 - DNA, 23 bp, Homo sapiens
ggaacagggcccggcgagtcacc

SEQ ID NO: 418 - DNA, 34 bp, Homo sapiens
caactttactaaaatcttgccgggcccacttggg

SEQ ID NO: 419 - DNA, 22 bp, Homo sapiens
aaatcttgccgggcccacttgg

SEQ ID NO: 420 - DNA, 35 bp, Homo sapiens
attctcaaaagcaccaacttagcccccgctatcat

SEQ ID NO: 421 - DNA, 22 bp, Homo sapiens
aaagcaccaacttagcccccgc

SEQ ID NO: 422 - DNA, 53 bp, Homo sapiens
gcaatttgcaccccagcccagcgctcccggttgctcctccagcttccatgtgg

SEQ ID NO: 423 - DNA, 22 bp, Homo sapiens
tgctcctccagcttccatgtgg

SEQ ID NO: 424 - DNA, 22 bp, Homo sapiens
cccagcccagcgctcccggttg

SEQ ID NO: 425 - DNA, 22 bp, Homo sapiens
aatttgcaccccagcccagcgc

SEQ ID NO: 426 - DNA, 36 bp, Homo sapiens
gggcaccccgaaggcgcgagccaggccgaagtcagc

SEQ ID NO: 427 - DNA, 23 bp, Homo sapiens
gcgcgagccaggccgaagtcagc

SEQ ID NO: 428 - DNA, 22 bp, Homo sapiens
gggcaccccgaaggcgcgagcc

SEQ ID NO: 429 - DNA, 36 bp, Homo sapiens
ttatagtcaggcagctgggtgaccccgggccatgtg

SEQ ID NO: 430 - DNA, 22 bp, Homo sapiens
ggcagctgggtgaccccgggcc

SEQ ID NO: 431 - DNA, 34 bp, Homo sapiens
ccagggcagtcttggctgtgatccgctggctggg

SEQ ID NO: 432 - DNA, 22 bp, Homo sapiens
tggctgtgatccgctggctggg

SEQ ID NO: 433 - DNA, 36 bp, Homo sapiens
gggatgagaagtacgggtgggccagggcagtcttgg

SEQ ID NO: 434 - DNA, 22 bp, Homo sapiens
cgggtgggccagggcagtcttg

SEQ ID NO: 435 - DNA, 43 bp, Homo sapiens
gtcccaatccacctctcaatgcctaccaaccgccactcacctt

SEQ ID NO: 436 - DNA, 25 bp, Homo sapiens
caatgcctaccaaccgccactcacc

SEQ ID NO: 437 - DNA, 33 bp, Homo sapiens
tgcgtacgggcaatcactctcctatccaaccag

SEQ ID NO: 438 - DNA, 25 bp, Homo sapiens
cgggcaatcactctcctatccaacc

SEQ ID NO: 439 - DNA, 44 bp, Homo sapiens
ccctcccgggcagcgtcgtgcacgggtcgggtgagagtggcggg

SEQ ID NO: 440 - DNA, 22 bp, Homo sapiens
cgggtcgggtgagagtggcggg

SEQ ID NO: 441 - DNA, 22 bp, Homo sapiens
ccctcccgggcagcgtcgtgca

SEQ ID NO: 442 - DNA, 22 bp, Homo sapiens
gggcagcgtcgtgcacgggtcg

SEQ ID NO: 443 - DNA, 73 bp, Homo sapiens
agccgaaggctccatgctgctccccgccgccggatccatgctgctccccgccgcccgttgtctgttctccccc

SEQ ID NO: 444 - DNA, 22 bp, Homo sapiens
ccatgctgctccccgccgcccg

SEQ ID NO: 445 - DNA, 22 bp, Homo sapiens
ccccgccgcccgttgtctgttc

SEQ ID NO: 446 - DNA, 22 bp, Homo sapiens
tccatgctgctccccgccgccg

SEQ ID NO: 447 - DNA, 39 bp, Homo sapiens
gcctccagcagcgcccgcacctcctctacccgaccccgg

SEQ ID NO: 448 - DNA, 22 bp, Homo sapiens
gcgcccgcacctcctctacccg

SEQ ID NO: 449 - DNA, 22 bp, Homo sapiens
gcctccagcagcgcccgcacct

SEQ ID NO: 450 - DNA, 32 bp, Homo sapiens
gttactgcctctggtgccccccgcagccgcgc

SEQ ID NO: 451 - DNA, 22 bp, Homo sapiens
ctggtgccccccgcagccgcgc

SEQ ID NO: 452 - DNA, 22 bp, Homo sapiens
tactgcctctggtgccccccgc

SEQ ID NO: 453 - DNA, 25 bp, Homo sapiens
tccgcgccgtggagcagcagcagct

SEQ ID NO: 454 - DNA, 22 bp, Homo sapiens
ccgcgccgtggagcagcagcag

SEQ ID NO: 455 - DNA, 26 bp, Homo sapiens
cgcgccccggcccggtgcagcaccac

SEQ ID NO: 456 - DNA, 22 bp, Homo sapiens
cgcgccccggcccggtgcagca

SEQ ID NO: 457 - DNA, 34 bp, Homo sapiens
gcagacggccccaggcatcgcgcacgtccagccg

SEQ ID NO: 458 - DNA, 22 bp, Homo sapiens
aggcatcgcgcacgtccagccg

SEQ ID NO: 459 - DNA, 22 bp, Homo sapiens
acggccccaggcatcgcgcacg

SEQ ID NO: 460 - DNA, 23 bp, Homo sapiens
gcagccgcgcgcaggtaccgtgc

SEQ ID NO: 461 - DNA, 22 bp, Homo sapiens
gcagccgcgcgcaggtaccgtg

SEQ ID NO: 462 - DNA, 25 bp, Homo sapiens
gctggatgcctgacctgggaagttt

SEQ ID NO: 463 - DNA, 23 bp, Homo sapiens
gctggatgcctgacctgggaagt

SEQ ID NO: 464 - DNA, 22 bp, Homo sapiens
agcaggaggctggcccgaattc

SEQ ID NO: 465 - DNA, 66 bp, Homo sapiens
tgagtactgcctatgtgcgcagctgagaagcccgacctgagttcactggctctgcagcaggaggct

SEQ ID NO: 466 - DNA, 24 bp, Homo sapiens
ttcactggctctgcagcaggaggc

SEQ ID NO: 467 - DNA, 24 bp, Homo sapiens
gaagcccgacctgagttcactggc

SEQ ID NO: 468 - DNA, 24 bp, Homo sapiens
tgtgcgcagctgagaagcccgacc

SEQ ID NO: 469 - DNA, 33 bp, Homo sapiens
tgcgctgccctgcagaggtcaaaccccatccaa

SEQ ID NO: 470 - DNA, 22 bp, Homo sapiens
tgcgctgccctgcagaggtcaa

SEQ ID NO: 471 - DNA, 27 bp, Homo sapiens
tttttcaccttcactgggccccatggg

SEQ ID NO: 472 - DNA, 22 bp, Homo sapiens
tcaccttcactgggccccatgg

SEQ ID NO: 473 - DNA, 45 bp, Homo sapiens
cctggtaatgagtagctgccaagggttgaagcagcaggtgcctcc

SEQ ID NO: 474 - DNA, 22 bp, Homo sapiens
tgccaagggttgaagcagcagg

SEQ ID NO: 475 - DNA, 25 bp, Homo sapiens
tgagtagctgccaagggttgaagca

SEQ ID NO: 476 - DNA, 46 bp, Homo sapiens
tttccgtaatgtggactttctggtgccgagcaagttgtgagctgta

SEQ ID NO: 477 - DNA, 24 bp, Homo sapiens
tggtgccgagcaagttgtgagctc

SEQ ID NO: 478 - DNA, 37 bp, Homo sapiens
cagtgtgggttctctggtgcacggtgaggctcgacct

SEQ ID NO: 479 - DNA, 24 bp, Homo sapiens
tctggtgcacggtgaggctcgacc

SEQ ID NO: 480 - DNA, 39 bp, Homo sapiens
gggctgggtgtcagaggtgagagggcagggcaagcaggc

SEQ ID NO: 481 - DNA, 23 bp, Homo sapiens
gtgagagggcagggcaagcaggc

SEQ ID NO: 482 - DNA, 23 bp, Homo sapiens
tgggtgtcagaggtgagagggca

SEQ ID NO: 483 - DNA, 33 bp, Homo sapiens
cacaatcactacattcacccgaatcccgaattc

SEQ ID NO: 484 - DNA, 22 bp, Homo sapiens
cattcacccgaatcccgaattc

SEQ ID NO: 485 - DNA, 34 bp, Homo sapiens
ggtttctcccccgtgtggatcctccgatgcagaa

SEQ ID NO: 486 - DNA, 22 bp, Homo sapiens
ccccgtgtggatcctccgatgc

SEQ ID NO: 487 - DNA, 43 bp, Homo sapiens
cggtcgtaactctgagggagcttttgctcatgccgatcccatt

SEQ ID NO: 488 - DNA, 22 bp, Homo sapiens
gcttttgctcatgccgatccca

SEQ ID NO: 489 - DNA, 39 bp, Homo sapiens
atcgaattctgtcccgactgtgcttccatccccaccttg

SEQ ID NO: 490 - DNA, 22 bp, Homo sapiens
cccgactgtgcttccatcccca

SEQ ID NO: 491 - DNA, 38 bp, Homo sapiens
tgtttggacagatttgcccattagccccaggacaactg

SEQ ID NO: 492 - DNA, 24 bp, Homo sapiens
tgcccattagccccaggacaactg

SEQ ID NO: 493 - DNA, 35 bp, Homo sapiens
aagtgcttctgaccctctccctcacagccggttac

SEQ ID NO: 494 - DNA, 22 bp, Homo sapiens
tgaccctctccctcacagccgg

SEQ ID NO: 495 - DNA, 33 bp, Homo sapiens
ggaaggtcatcccgtcggttgggaaaactcggg

SEQ ID NO: 496 - DNA, 22 bp, Homo sapiens
ccgtcggttgggaaaactcggg

SEQ ID NO: 497 - DNA, 41 bp, Homo sapiens
gaatcccctctcccgccgccgccgccgtgtctggtctgtac

SEQ ID NO: 498 - DNA, 22 bp, Homo sapiens
cgccgccgccgtgtctggtctg

SEQ ID NO: 499 - DNA, 22 bp, Homo sapiens
gaatcccctctcccgccgccgc

SEQ ID NO: 500 - DNA, 61 bp, Homo sapiens
ggtagtccccactctcctgtctgatccctccctctcctccccgagttccaccgccccaggc

SEQ ID NO: 501 - DNA, 22 bp, Homo sapiens
ccccgagttccaccgccccagg

SEQ ID NO: 502 - DNA, 22 bp, Homo sapiens
tgatccctccctctcctccccg

SEQ ID NO: 503 - DNA, 25 bp, Homo sapiens
ccccactctcctgtctgatccctcc

SEQ ID NO: 504 - DNA, 33 bp, Homo sapiens
caggagaattgcttgaacccaggaggcggaggt

SEQ ID NO: 505 - DNA, 22 bp, Homo sapiens
gcttgaacccaggaggcggagg

SEQ ID NO: 506 - DNA, 42 bp, Homo sapiens
ctggtcctaagcagttaccctgtaaatagttaatgtgagctc

SEQ ID NO: 507 - DNA, 27 bp, Homo sapiens
taccctgtaaatagttaatgtgagctc

SEQ ID NO: 508 - DNA, 27 bp, Homo sapiens
cagtctttgcccgagcgcttccgagag

SEQ ID NO: 509 - DNA, 22 bp, Homo sapiens
tctttgcccgagcgcttccgag

SEQ ID NO: 510 - DNA, 22 bp, Homo sapiens
gccccaggcgcacaggtttccg

SEQ ID NO: 511 - DNA, 40 bp, Homo sapiens
gccaggaccgcgcacagcagcagggcgcgggcgagcatcc

SEQ ID NO: 512 - DNA, 22 bp, Homo sapiens
agcagggcgcgggcgagcatcc

SEQ ID NO: 513 - DNA, 22 bp, Homo sapiens
ggaccgcgcacagcagcagggc

SEQ ID NO: 514 - DNA, 32 bp, Homo sapiens
acctctatcttaccccatggcccagcccgttg

SEQ ID NO: 515 - DNA, 22 bp, Homo sapiens
taccccatggcccagcccgttg

SEQ ID NO: 516 - DNA, 26 bp, Homo sapiens
cgatgtggcggttggtggaaggtgcc

SEQ ID NO: 517 - DNA, 22 bp, Homo sapiens
tctggcggttggtggaaggtgc

SEQ ID NO: 518 - DNA, 27 bp, Homo sapiens
ctggcattgtagggttgggcagggtcc

SEQ ID NO: 519 - DNA, 22 bp, Homo sapiens
ggcattgtagggttgggcaggg

SEQ ID NO: 520 - DNA, 31 bp, Homo sapiens
cagtgtctggtgctgatgcgggtgcgagtgc

SEQ ID NO: 521 - DNA, 22 bp, Homo sapiens
tctggtgctgatgcgggtgcga

SEQ ID NO: 522 - DNA, 36 bp, Homo sapiens
tgaggatggtgtgctgggtgctggtgctggtgtggg

SEQ ID NO: 523 - DNA, 22 bp, Homo sapiens
tgggtgctggtgctggtgtggg

SEQ ID NO: 524 - DNA, 32 bp, Homo sapiens
gggcggatgtggcgaggtctggtgatgtgctg

SEQ ID NO: 525 - DNA, 22 bp, Homo sapiens
gggcggatgtggcgaggtctgg

SEQ ID NO: 526 - DNA, 36 bp, Homo sapiens
tccggatcctcgtctaccacccttcgccggcgcccc

SEQ ID NO: 527 - DNA, 22 bp, Homo sapiens
taccacccttcgccggcgcccc

SEQ ID NO: 528 - DNA, 22 bp, Homo sapiens
cctcgtctaccacccttcgccg

SEQ ID NO: 529 - DNA, 23 bp, Homo sapiens
cgtcaaactacacctccgccgcg

SEQ ID NO: 530 - DNA, 39 bp, Homo sapiens
tgggctaatgtggcaatctgtggctgggcttgaacttgc

SEQ ID NO: 531 - DNA, 22 bp, Homo sapiens
tgtggcaatctgtggctgggct

SEQ ID NO: 532 - DNA, 51 bp, Homo sapiens
agctcctccgtcactgctttcgttcacggcccggatctcgctggagtttta

SEQ ID NO: 533 - DNA, 22 bp, Homo sapiens
tcacggcccggatctcgctgga

SEQ ID NO: 534 - DNA, 22 bp, Homo sapiens
cactgctttcgttcacggcccg

SEQ ID NO: 535 - DNA, 25 bp, Homo sapiens
gctgggccgcctgaatgactccatg

SEQ ID NO: 536 - DNA, 22 bp, Homo sapiens
gctgggccgcctgaatgactcc

SEQ ID NO: 537 - DNA, 34 bp, Homo sapiens
tggttaatgtttgcaggccctgtaccccatcggt

SEQ ID NO: 538 - DNA, 24 bp, Homo sapiens
tttgcaggccctgtaccccatcgg

SEQ ID NO: 539 - DNA, 25 bp, Homo sapiens
cgatctggcggttggtggaaggtgc

SEQ ID NO: 540 - DNA, 22 bp, Homo sapiens
tctggcggttggtggaaggtgc

SEQ ID NO: 541 - DNA, 27 bp, Homo sapiens
ctggcattgtagggttgggcagggtcc

SEQ ID NO: 542 - DNA, 22 bp, Homo sapiens
ggcattgtagggttgggcaggg

SEQ ID NO: 543 - DNA, 31 bp, Homo sapiens; identical to SEQ ID NO: 520

SEQ ID NO: 544 - DNA, 22 bp, Homo sapiens
tctggtgctgatgcgggtgcga

SEQ ID NO: 545 - DNA, 37 bp, Homo sapiens
tgaggatggtgtgctgggtgctggtgctggtgtgggt

SEQ ID NO: 546 - DNA, 22 bp, Homo sapiens
tgggtgctggtgctggtgtggg

SEQ ID NO: 547 - DNA, 24 bp, Homo sapiens
gggcggatgtggcgaggtctggtg

SEQ ID NO: 548 - DNA, 22 bp, Homo sapiens
gggcggatgtggcgaggtctgg

SEQ ID NO: 549 - DNA, 32 bp, Homo sapiens
gtccggatcctcgtctaccacccttcgccggc

SEQ ID NO: 550 - DNA, 23 bp, Homo sapiens
tcctcgtctaccacccttcgccg

SEQ ID NO: 551 - DNA, 23 bp, Homo sapiens
aggtccttgtattgcctggcaga

SEQ ID NO: 552 - DNA, 18 bp, Homo sapiens
gtccttgtattgcctggc

SEQ ID NO: 553 - DNA, 40 bp, Homo sapiens
agatttcttctgcatggcggttacagggcaatctttatga

SEQ ID NO: 554 - DNA, 22 bp, Homo sapiens
tctgcatggcggttacagggca

SEQ ID NO: 555 - DNA, 44 bp, Homo sapiens
caacttcctgagggctgtgactgggaggaaggagccataacgat

SEQ ID NO: 556 - DNA, 22 bp, Homo sapiens
cctgagggctgtgactgggagg

SEQ ID NO: 557 - DNA, 33 bp, Homo sapiens
tcgttagctgctcttctccgacgaccacttgta

SEQ ID NO: 558 - DNA, 22 bp, Homo sapiens
agctgctcttctccgacgacca

SEQ ID NO: 559 - DNA, 47 bp, Homo sapiens
gtttctgtagtggatgtggctggctgttgtaatgactgcggtcgaga

SEQ ID NO: 560 - DNA, 22 bp, Homo sapiens
agtggatgtggctggctgttgt

SEQ ID NO: 561 - DNA, 36 bp, Homo sapiens
cattgggaacctgtaatgatgctggacgaacaatag

SEQ ID NO: 562 - DNA, 22 bp, Homo sapiens
tgggaacctgtaatgatgctgg

SEQ ID NO: 563 - DNA, 37 bp, Homo sapiens
agtcagaacttgtaagcagcacattgggaacctgtaa

SEQ ID NO: 564 - DNA, 22 bp, Homo sapiens
gtaagcagcacattgggaacct

SEQ ID NO: 565 - DNA, 23 bp, Homo sapiens
aggatggtgcctgggtgattaca

SEQ ID NO: 566 - DNA, 22 bp, Homo sapiens
ggatggtgcctgggtgattaca

SEQ ID NO: 567 - DNA, 34 bp, Homo sapiens
ccattggtaactggaggatgttgctgggtcaaag

SEQ ID NO: 568 - DNA, 22 bp, Homo sapiens
actggaggatgttgctgggtca

SEQ ID NO: 569 - DNA, 39 bp, Homo sapiens
ccacttgtactttgggtctgtggagttgtgtgagctgga

SEQ ID NO: 570 - DNA, 22 bp, Homo sapiens
gggtctgtggagttgtgtgagc

SEQ ID NO: 571 - DNA, 40 bp, Homo sapiens
agactgaacccagactttccttttttgtcggcatcttgaa

SEQ ID NO: 572 - DNA, 22 bp, Homo sapiens
tccttttttgtcggcatcttga

SEQ ID NO: 573 - DNA, 30 bp, Homo sapiens
gctgtgccacttcatttctcagcagggtga

SEQ ID NO: 574 - DNA, 22 bp, Homo sapiens
gccacttcatttctcagcaggg

SEQ ID NO: 575 - DNA, 41 bp, Homo sapiens
gaactgactccattggatgtgctgaccgaactatgctgtat

SEQ ID NO: 576 - DNA, 22 bp, Homo sapiens
ggatgtgctgaccgaactatgc

SEQ ID NO: 577 - DNA, 30 bp, Homo sapiens
gaaactggtctttccttgatttccctttga

SEQ ID NO: 578 - DNA, 22 bp, Homo sapiens
tggtctttccttgatttccctt

SEQ ID NO: 579 - DNA, 23 bp, Homo sapiens
gggaacaccaggcacatcagagg

SEQ ID NO: 580 - DNA, 30 bp, Homo sapiens
cactccctgtggcaaagcagcagtaggagc

SEQ ID NO: 581 - DNA, 22 bp, Homo sapiens
cactccctgtggcaaagcagca

SEQ ID NO: 582 - DNA, 36 bp, Homo sapiens
cctcagctctcgtttgcgtgttgcttcttctgccag

SEQ ID NO: 583 - DNA, 22 bp, Homo sapiens
ttgcgtgttgcttcttctgcca

SEQ ID NO: 584 - DNA, 35 bp, Homo sapiens
ctgacgtaaagcagggattgaattttggccagtct

SEQ ID NO: 585 - DNA, 22 bp, Homo sapiens
aagcagggattgaattttggcc

SEQ ID NO: 586 - DNA, 32 bp, Homo sapiens
tcatgctgtgattcaactgtttccatggtcat

SEQ ID NO: 587 - DNA, 22 bp, Homo sapiens
attcaactgtttccatggtcat

SEQ ID NO: 588 - DNA, 28 bp, Homo sapiens
gactgtgcaaacttccgggcgatgcagc

SEQ ID NO: 589 - DNA, 22 bp, Homo sapiens
gcaaacttccgggcgatgcagc

SEQ ID NO: 590 - DNA, 45 bp, Homo sapiens
tcttcctccatcgagcccgatttgtgccgcttgctcccactggag

SEQ ID NO: 591 - DNA, 22 bp, Homo sapiens
cgagcccgatttgtgccgcttg

SEQ ID NO: 592 - DNA, 33 bp, Homo sapiens
cgtccagttgcggctgctactcgtgggcgagct

SEQ ID NO: 593 - DNA, 22 bp, Homo sapiens
tgcggctgctactcgtgggcga

SEQ ID NO: 594 - DNA, 38 bp, Homo sapiens
tcgtagggaaatgcagagcggaggacgggtgtgggctc

SEQ ID NO: 595 - DNA, 22 bp, Homo sapiens
gcagagcggaggacgggtgtgg

SEQ ID NO: 596 - DNA, 28 bp, Homo sapiens
caggttgctggctggctgggtcgcaggc

SEQ ID NO: 597 - DNA, 22 bp, Homo sapiens
ggttgctggctggctgggtcgc

SEQ ID NO: 598 - DNA, 32 bp, Homo sapiens
gggacgtgtcgggcggagagtaggaaggcgag

SEQ ID NO: 599 - DNA, 22 bp, Homo sapiens
cgggcggagagtaggaaggcga

SEQ ID NO: 600 - DNA, 26 bp, Homo sapiens
gctgctgcgaggaggcgaggccggcg

SEQ ID NO: 601 - DNA, 22 bp, Homo sapiens
ctgcgaggaggcgaggccggcg

SEQ ID NO: 602 - DNA, 45 bp, Homo sapiens
gttgaaccaggtgtaggcgaaggcgcggacgtgaggcagcagggc

SEQ ID NO: 603 - DNA, 22 bp, Homo sapiens
ggcgcggacgtgaggcagcagg

SEQ ID NO: 604 - DNA, 22 bp, Homo sapiens
ggcgaaggcgcggacgtgaggc

SEQ ID NO: 605 - DNA, 22 bp, Homo sapiens
ccaggtgtaggcgaaggcgcgg

SEQ ID NO: 606 - DNA, 27 bp, Homo sapiens
cgcttccgcgcctgcaggttgaaccag

SEQ ID NO: 607 - DNA, 22 bp, Homo sapiens
cgcttccgcgcctgcaggttga

SEQ ID NO: 608 - DNA, 29 bp, Homo sapiens
gccagcagccgcgacgcccacttctgctt

SEQ ID NO: 609 - DNA, 22 bp, Homo sapiens
gccagcagccgcgacgcccact

SEQ ID NO: 610 - DNA, 35 bp, Homo sapiens
gcactcgggccggatgtccttgcgcagcttggcca

SEQ ID NO: 611 - DNA, 22 bp, Homo sapiens
cgggccggatgtccttgcgcag

SEQ ID NO: 612 - DNA, 24 bp, Homo sapiens
gggttggagagcacgcagcccggc

SEQ ID NO: 613 - DNA, 22 bp, Homo sapiens
gttggagagcacgcagcccggc

SEQ ID NO: 614 - DNA, 36 bp, Homo sapiens
ccttgaccaggcgctcgccgtcggtgctctccagcg

SEQ ID NO: 615 - DNA, 22 bp, Homo sapiens
accaggcgctcgccgtcggtgc

SEQ ID NO: 616 - DNA, 42 bp, Homo sapiens
ggctgcacgcacaggaccgggtgaccgcactgcgcagccttg

SEQ ID NO: 617 - DNA, 23 bp, Homo sapiens
ccgggtgaccgcactgcgcagcc

SEQ ID NO: 618 - DNA, 22 bp, Homo sapiens
cgcacaggaccgggtgaccgca

SEQ ID NO: 619 - DNA, 32 bp, Homo sapiens
gcgatgacgggccggtggtgctgggtgaagct

SEQ ID NO: 620 - DNA, 22 bp, Homo sapiens
cgggccggtggtgctgggtgaa

SEQ ID NO: 621 - DNA, 28 bp, Homo sapiens
caggttgctggctggctgggtcgcaggc

SEQ ID NO: 622 - DNA, 22 bp, Homo sapiens
gctggctggctgggtcgcaggc

SEQ ID NO: 623 - DNA, 44 bp, Homo sapiens
caccctcctgcagatatcccgcatccctttacccgtctcgtctt

SEQ ID NO: 624 - DNA, 23 bp, Homo sapiens
cccgcatccctttacccgtctcg

SEQ ID NO: 625 - DNA, 68 bp, Homo sapiens
aatagtcgtagccgccggtcgcagcccaggccagcctaccagcccgcccgctcgctcacccagctcga

SEQ ID NO: 626 - DNA, 22 bp, Homo sapiens
gccagcctaccagcccgcccgc

SEQ ID NO: 627 - DNA, 22 bp, Homo sapiens
gcccgcccgctcgctcacccag

SEQ ID NO: 628 - DNA, 22 bp, Homo sapiens
ccggtcgcagcccaggccagcc

SEQ ID NO: 629 - DNA, 22 bp, Homo sapiens
cgtagccgccggtcgcagccca

SEQ ID NO: 630 - DNA, 23 bp, Homo sapiens
cgagccaccgcacccagccttta

SEQ ID NO: 631 - DNA, 22 bp, Homo sapiens
cgagccaccgcacccagccttt

SEQ ID NO: 632 - DNA, 22 bp, Homo sapiens
cgggagaaaacgcctgcgcggg

SEQ ID NO: 633 - DNA, 43 bp, Homo sapiens
ttgaaatggaccaatgaaagcgctcgcggccttgacgtcattc

SEQ ID NO: 634 - DNA, 22 bp, Homo sapiens
gaaagcgctcgcggccttgacg

SEQ ID NO: 635 - DNA, 23 bp, Homo sapiens
gaccaatgaaagcgctcgcggcc

SEQ ID NO: 636 - DNA, 46 bp, Homo sapiens
gtgcactctgcccagccgaccactcgcaccgacccggccaaagaat

SEQ ID NO: 637 - DNA, 22 bp, Homo sapiens
ccactcgcaccgacccggccaa

SEQ ID NO: 638 - DNA, 22 bp, Homo sapiens
gcccagccgaccactcgcaccg

SEQ ID NO: 639 - DNA, 25 bp, Homo sapiens
cgggatcagcctgcggcgccaagca

SEQ ID NO: 640 - DNA, 22 bp, Homo sapiens
cgggatcagcctgcggcgccaa

SEQ ID NO: 641 - DNA, 22 bp, Homo sapiens
gcaggccccggcgcagagttgc

SEQ ID NO: 642 - DNA, 33 bp, Homo sapiens
cgggtccgcggttgttggacgggcgctgccttt

SEQ ID NO: 643 - DNA, 22 bp, Homo sapiens
cggttgttggacgggcgctgcc

SEQ ID NO: 644 - DNA, 19 bp, Homo sapiens
cgggtccgcggttgttgga

SEQ ID NO: 645 - DNA, 58 bp, Homo sapiens
gggagaagcagaacaccggagcccgaccagccaaggacctacacccagcagaaaccaa

SEQ ID NO: 646 - DNA, 24 bp, Homo sapiens
ggacctacacccagcagaaaccaa

SEQ ID NO: 647 - DNA, 24 bp, Homo sapiens
ccggagcccgaccagccaaggacc

SEQ ID NO: 648 - DNA, 24 bp, Homo sapiens
aagcagaacaccggagcccgacca

SEQ ID NO: 649 - DNA, 37 bp, Homo sapiens
gagttcctggtgactcggagcgccatggcttcctctt

SEQ ID NO: 650 - DNA, 23 bp, Homo sapiens
tgactcggagcgccatggcttcc

SEQ ID NO: 651 - DNA, 22 bp, Homo sapiens
gggccgtaggaacgcgctttgc

SEQ ID NO: 652 - DNA, 30 bp, Homo sapiens
ctcagtccgggcttggaggttgcagcaggg

SEQ ID NO: 653 - DNA, 22 bp, Homo sapiens
tccgggcttggaggttgcagca

SEQ ID NO: 654 - DNA, 35 bp, Homo sapiens
ccagcccggcgccctctccctcctgctttccccgg

SEQ ID NO: 655 - DNA, 22 bp, Homo sapiens
ctctccctcctgctttccccgg

SEQ ID NO: 656 - DNA, 22 bp, Homo sapiens
gcccggcgccctctccctcctg

SEQ ID NO: 657 - DNA, 30 bp, Homo sapiens
ccaccccccgacctacctccagcatccagg

SEQ ID NO: 658 - DNA, 22 bp, Homo sapiens
caccccccgacctacctccagc

SEQ ID NO: 659 - DNA, 27 bp, Homo sapiens
ggcacagcagctccatggccagcccgg

SEQ ID NO: 660 - DNA, 22 bp, Homo sapiens
agcagctccatggccagcccgg

SEQ ID NO: 661 - DNA, 28 bp, Homo sapiens
cctgcggaccgggtccacctcgtggcac

SEQ ID NO: 662 - DNA, 22 bp, Homo sapiens
cctgcggaccgggtccacctcg

SEQ ID NO: 663 - DNA, 56 bp, Homo sapiens
gagttgcagatgggacttcggagtcgggaccccagccaagaaacggtccaggtaat

SEQ ID NO: 664 - DNA, 22 bp, Homo sapiens
cgggaccccagccaagaaacgg

SEQ ID NO: 665 - DNA, 22 bp, Homo sapiens
tcggagtcgggaccccagccaa

SEQ ID NO: 666 - DNA, 22 bp, Homo sapiens
gggacttcggagtcgggacccc

SEQ ID NO: 667 - DNA, 23 bp, Homo sapiens
gcggtcagcgggctggtctcttt

SEQ ID NO: 668 - DNA, 22 bp, Homo sapiens
gcggtcagcgggctggtctctt

SEQ ID NO: 669 - DNA, 42 bp, Homo sapiens
gccaggttccacttcaacttccccagcaccaccagttcccac

SEQ ID NO: 670 - DNA, 22 bp, Homo sapiens
tccccagcaccaccagttccca

SEQ ID NO: 671 - DNA, 31 bp, Homo sapiens
acttccagttgcgatcatcgacggtgggtac

SEQ ID NO: 672 - DNA, 25 bp, Homo sapiens
tccagttgcgatcatcgacggtggg

SEQ ID NO: 673 - DNA, 30 bp, Homo sapiens
cagtcagggcatcacaatggagcgagctca

SEQ ID NO: 674 - DNA, 23 bp, Homo sapiens
cagggcatcacaatggagcgagc

SEQ ID NO: 675 - DNA, 27 bp, Homo sapiens
cggtccgggcggtacctccagcatcca

SEQ ID NO: 676 - DNA, 25 bp, Homo sapiens
gcggtccgggcggtacctccagcat

SEQ ID NO: 677 - DNA, 43 bp, Homo sapiens
tcatgtgcaatcacagcagccaggtcccacttgaagcttccct

SEQ ID NO: 678 - DNA, 25 bp, Homo sapiens
gcagccaggtcccacttgagcttcc

SEQ ID NO: 679 - DNA, 25 bp, Homo sapiens
tgtgcaatcacagcagccaggtccc

SEQ ID NO: 680 - DNA, 33 bp, Homo sapiens
gcagagagagccggtgcagaatgaaggccagga

SEQ ID NO: 681 - DNA, 23 bp, Homo sapiens
ccggtgcagaatgaaggccagga

SEQ ID NO: 682 - DNA, 35 bp, Homo sapiens
ggcatgctttttgaccaaggcctgtcggtcacggg

SEQ ID NO: 683 - DNA, 22 bp, Homo sapiens
accaaggcctgtcggtcacggg

SEQ ID NO: 684 - DNA, 41 bp, Homo sapiens
agccccaatgctgcccgtggcgatcatggatggcgggtaca

SEQ ID NO: 685 - DNA, 22 bp, Homo sapiens
cccgtggcgatcatggatggcg

SEQ ID NO: 686 - DNA, 22 bp, Homo sapiens
gccccaatgctgcccgtggcga

SEQ ID NO: 687 - DNA, 32 bp, Homo sapiens
ctcatccccggacatggagcaggcacccaggc

SEQ ID NO: 688 - DNA, 23 bp, Homo sapiens
ccccggacatggagcaggcaccc

SEQ ID NO: 689 - DNA, 28 bp, Homo sapiens
cgctcggctctcgcttctgctgccccgc

SEQ ID NO: 690 - DNA, 22 bp, Homo sapiens
gctctcgcttctgctgccccgc

SEQ ID NO: 691 - DNA, 31 bp, Homo sapiens
gggctgtgggtcctggctgggtccgcgctcg

SEQ ID NO: 692 - DNA, 22 bp, Homo sapiens
tgtgggtcctggctgggtccgc

SEQ ID NO: 693 - DNA, 33 bp, Homo sapiens
cagcacccggtcgttgaggaggttggcatcggg

SEQ ID NO: 694 - DNA, 22 bp, Homo sapiens
cgttgaggaggttggcatcggg

SEQ ID NO: 695 - DNA, 34 bp, Homo sapiens
gctgcaggcggctctttttcacgggctccagcga

SEQ ID NO: 696 - DNA, 22 bp, Homo sapiens
caggcggctctttttcacgggc

SEQ ID NO: 697 - DNA, 26 bp, Homo sapiens
gccaccacgctccccgctgccaccat

SEQ ID NO: 698 - DNA, 22 bp, Homo sapiens
ccacgctccccgctgccaccat

SEQ ID NO: 699 - DNA, 31 bp, Homo sapiens
cactctggagaggaagcgtctgaggcggtag

SEQ ID NO: 700 - DNA, 22 bp, Homo sapiens
ggagaggaagcgtgtgaggcgg

SEQ ID NO: 701 - DNA, 25 bp, Homo sapiens
ccccacgaggagacagtaaccgaac

SEQ ID NO: 702 - DNA, 22 bp, Homo sapiens
ccccacgaggagacagtaaccg

SEQ ID NO: 703 - DNA, 33 bp, Homo sapiens
gaaactccccacacaagagatgaagcccgagag

SEQ ID NO: 704 - DNA, 25 bp, Homo sapiens
tccccacacaagagatgaagcccga

SEQ ID NO: 705 - DNA, 40 bp, Homo sapiens
gggagatgccttggaaatccgctttgttctgtgggttgat

SEQ ID NO: 706 - DNA, 25 bp, Homo sapiens
tgccttggaaatccgctttgttctg

SEQ ID NO: 707 - DNA, 31 bp, Homo sapiens
caaactcttggaggacccgtcgaccacaccg

SEQ ID NO: 708 - DNA, 22 bp, Homo sapiens
ggaggacccgtcgaccacaccg

SEQ ID NO: 709 - DNA, 74 bp, Homo sapiens
ccgcgaaatgacagacactaccgacgccgacataactgcacgcaaggtactccggtccgcgccccaaactcttg

SEQ ID NO: 710 - DNA, 22 bp, Homo sapiens
tccggtccgcgccccaaactct

SEQ ID NO: 711 - DNA, 25 bp, Homo sapiens
gcacgcaaggtactccggtccgcgc

SEQ ID NO: 712 - DNA, 23 bp, Homo sapiens
ccgacgccgacataactgcacgc

SEQ ID NO: 713 - DNA, 33 bp, Homo sapiens
gcaacttcagacgctgcggagtggagctcaagt

SEQ ID NO: 714 - DNA, 25 bp, Homo sapiens
ttcagacgctgcggagtggagctca

SEQ ID NO: 715 - DNA, 37 bp, Homo sapiens
agtaaccgaactgcagcgccccggtcagcagtatata

SEQ ID NO: 716 - DNA, 22 bp, Homo sapiens
tgcagcgccccggtcagcagta

SEQ ID NO: 717 - DNA, 22 bp, Homo sapiens
cgaactgcagcgccccggtcag

SEQ ID NO: 718 - DNA, 23 bp, Homo sapiens
agtaaccgaactgcagcgccccg

SEQ ID NO: 719 - DNA, 23 bp, Homo sapiens
gggagatgccttggaaatccgct

SEQ ID NO: 720 - DNA, 35 bp, Homo sapiens
tgacaacaaggtgcaggatggtgctggcaaagaga

SEQ ID NO: 721 - DNA, 24 bp, Homo sapiens
caaggtgcaggatggtgctggcaa

SEQ ID NO: 722 - DNA, 36 bp, Homo sapiens
cagacactacggacgccgacataactgcacgcaagg

SEQ ID NO: 723 - DNA, 23 bp, Homo sapiens
ccgacgccgacataactgcacgc

SEQ ID NO: 724 - DNA, 24 bp, Homo sapiens
tgacagacactaccgacgccgaca

SEQ ID NO: 725 - DNA, 31 bp, Homo sapiens; identical to SEQ ID NO: 707

SEQ ID NO: 726 - DNA, 22 bp, Homo sapiens
ggaggacccgtcgaccacaccg

SEQ ID NO: 727 - DNA, 42 bp, Homo sapiens
taactgcacgcaaggtactccggtccgcgccccaaactcttg

SEQ ID NO: 728 - DNA, 22 bp, Homo sapiens
ctccggtccgcgccccaaactc

SEQ ID NO: 729 - DNA, 25 bp, Homo sapiens
gcacgcaaggtactccggtccgcgc

SEQ ID NO: 730 - DNA, 34 bp, Homo sapiens
agcaacttcagacgctgcggagtggagctcaagt

SEQ ID NO: 731 - DNA, 23 bp, Homo sapiens
cagacgctgcggagtggagctca

SEQ ID NO: 732 - DNA, 24 bp, Homo sapiens
gcaacttcagacgctgcggagtgg

SEQ ID NO: 733 - DNA, 40 bp, Homo sapiens
agacagtaaccgaactgcagcgccccggtcagcagtatat

SEQ ID NO: 734 - DNA, 23 bp, Homo sapiens
tgcagcgccccggtcagcagtat

SEQ ID NO: 735 - DNA, 24 bp, Homo sapiens
cgaactgcagcgccccggtcagca

SEQ ID NO: 736 - DNA, 22 bp, Homo sapiens
gtaaccgaactgcagcgccccg

SEQ ID NO: 737 - DNA, 22 bp, Homo sapiens
gggagatgccttggaaatccgc

SEQ ID NO: 738 - DNA, 22 bp, Homo sapiens
tgcaggatggtgctggcaaaga

SEQ ID NO: 739 - DNA, 23 bp, Homo sapiens
caaggtgcaggatggtgctggca

SEQ ID NO: 740 - DNA, 40 bp, Homo sapiens
gctgcggcggccgacccccctcctccccactccccccgct

SEQ ID NO: 741 - DNA, 20 bp, Homo sapiens
tcctccccactccccccgct

SEQ ID NO: 742 - DNA, 22 bp, Homo sapiens
gctgcggcggccgacccccctc

SEQ ID NO: 743 - DNA, 46 bp, Homo sapiens
gcttcatgggcctggaacaggaacgcggtccagttggcctccatgg

SEQ ID NO: 744 - DNA, 23 bp, Homo sapiens
cgcggtccagttggcctccatgg

SEQ ID NO: 745 - DNA, 22 bp, Homo sapiens
tgggcctggaacaggaacgcgg

SEQ ID NO: 746 - DNA, 37 bp, Homo sapiens
atggtaagtcatccggtccttcctcttgaagcgctga

SEQ ID NO: 747 - DNA, 25 bp, Homo sapiens
ccggtccttcctcttgaagcgctga

SEQ ID NO: 748 - DNA, 39 bp, Homo sapiens
tgagtgtttctacttgcttccctggccagcttgtcacat

SEQ ID NO: 749 - DNA, 22 bp, Homo sapiens
tgcttccctggccagcttgtca

SEQ ID NO: 750 - DNA, 33 bp, Homo sapiens
cgggtcctctcgggtgggctggtgctggagagc

SEQ ID NO: 751 - DNA, 22 bp, Homo sapiens
cctctcgggtggctggtgctgg

SEQ ID NO: 752 - DNA, 22 bp, Homo sapiens
cgggtcctctcgggtgggctgg

SEQ ID NO: 753 - DNA, 26 bp, Homo sapiens
agctggtggtggctgggtgggatggg

SEQ ID NO: 754 - DNA, 22 bp, Homo sapiens
ggtggtggctgggtgggatggg

SEQ ID NO: 755 - DNA, 31 bp, Homo sapiens
tgctgtgcgggcaggcagcagagtcagcagt

SEQ ID NO: 756 - DNA, 22 bp, Homo sapiens
gcgggcaggcagcagagtcagc

SEQ ID NO: 757 - DNA, 78 bp, Homo sapiens
tccacccaggccttcctgctcacggttcgcaagggtgaggctggctggcctgggcaggaggtgggaagcaggctgctg

SEQ ID NO: 758 - DNA, 22 bp, Homo sapiens
gggcaggaggtgggaagcaggc

SEQ ID NO: 759 - DNA, 22 bp, Homo sapiens
ggctggcctgggcaggaggtgg

SEQ ID NO: 760 - DNA, 22 bp, Homo sapiens
cgcaagggtgaggctggctggc

SEQ ID NO: 761 - DNA, 22 bp, Homo sapiens
ggccttcctgctcacggttcgc

SEQ ID NO: 762 - DNA, 53 bp, Homo sapiens
gcagggtgtgaactgtccatctctccccaccgcctgctccacgccaagcccca

SEQ ID NO: 763 - DNA, 23 bp, Homo sapiens
ccgcctgctccacgccaagcccc

SEQ ID NO: 764 - DNA, 22 bp, Homo sapiens
ccccaccgcctgctccacgcca

SEQ ID NO: 765 - DNA, 24 bp, Homo sapiens
tgtccatctctccccaccgcctgc

SEQ ID NO: 766 - DNA, 54 bp, Homo sapiens
gcggccgcctccgggagccagggaccggccgaggagagtggcggccccggacgg

SEQ ID NO: 767 - DNA, 22 bp, Homo sapiens
ggagagtggcggccccggacgg

SEQ ID NO: 768 - DNA, 24 bp, Homo sapiens
ccagggaccggccgaggagagtgg

SEQ ID NO: 769 - DNA, 22 bp, Homo sapiens
gccgcctccgggagccagggac

SEQ ID NO: 770 - DNA, 22 bp, Homo sapiens
gcatccacgcgcggccgcctcc

SEQ ID NO: 771 - DNA, 25 bp, Homo sapiens
cagagacggcgccggctgcttgagg

SEQ ID NO: 772 - DNA, 22 bp, Homo sapiens
cagagacggcgccggctgcttg

SEQ ID NO: 773 - DNA, 27 bp, Homo sapiens
gctcttcaagccatagggcgccccggg

SEQ ID NO: 774 - DNA, 22 bp, Homo sapiens
tcaagccatagggcgccccggg

SEQ ID NO: 775 - DNA, 26 bp, Homo sapiens
gcttgcggcgtctgcggaggacaatg

SEQ ID NO: 776 - DNA, 22 bp, Homo sapiens
ttgcggcgtctgcggaggacaa

SEQ ID NO: 777 - DNA, 31 bp, Homo sapiens
ccctgaaagctcggctgctgcgtttggtgtt

SEQ ID NO: 778 - DNA, 22 bp, Homo sapiens
gctcggctgctgcgtttggtgt

SEQ ID NO: 779 - DNA, 22 bp, Homo sapiens
ccctgaaagctcggctgctgcg

SEQ ID NO: 780 - DNA, 47 bp, Homo sapiens
catctccatctccagctcctgggctcgccgggcagcctccactctcc

SEQ ID NO: 781 - DNA, 22 bp, Homo sapiens
cgccgggcagcctccactctcc

SEQ ID NO: 782 - DNA, 22 bp, Homo sapiens
ccagctcctgggctcgccgggc

SEQ ID NO: 783 - DNA, 43 bp, Homo sapiens
acggctcatggtcttgagggaggtccgggttttgccattgggc

SEQ ID NO: 784 - DNA, 22 bp, Homo sapiens
ggtccgggttttgccattgggc

SEQ ID NO: 785 - DNA, 24 bp, Homo sapiens
ttgagggaggtccgggttttgcca

SEQ ID NO: 786 - DNA, 43 bp, Homo sapiens
ctggaaagtagaggtcacatcgggtgcggagggagctaaggtt

SEQ ID NO: 787 - DNA, 22 bp, Homo sapiens
tcgggtgcggagggagctaagg

SEQ ID NO: 788 - DNA, 24 bp, Homo sapiens
ggtcacatcgggtgcggagggagc

SEQ ID NO: 789 - DNA, 31 bp, Homo sapiens
ccgtcagaaggcagcagggtgggctaggcaa

SEQ ID NO: 790 - DNA, 22 bp, Homo sapiens
ggcagcagggtgggctaggcaa

SEQ ID NO: 791 - DNA, 23 bp, Homo sapiens
ccccaggctggcagcatgtgctg

SEQ ID NO: 792 - DNA, 22 bp, Homo sapiens
ccccaggctggcagcatgtgct

SEQ ID NO: 793 - DNA, 26 bp, Homo sapiens
ggcctgacctccctgccaggccccag

SEQ ID NO: 794 - DNA, 22 bp, Homo sapiens
tgacctccctgccaggccccag

SEQ ID NO: 795 - DNA, 41 bp, Homo sapiens
ctcaaagaacctctgatgtcccctagcccaggcccagatag

SEQ ID NO: 796 - DNA, 22 bp, Homo sapiens
tgtcccctagcccaggcccaga

SEQ ID NO: 797 - DNA, 34 bp, Homo sapiens
cattatgatgagcccgtttgtcagccgcagattg

SEQ ID NO: 798 - DNA, 22 bp, Homo sapiens
tgagcccgtttgtcagccgcag

SEQ ID NO: 799 - DNA, 35 bp, Homo sapiens
cttgatcagctctcgctttccccttgctgctccag

SEQ ID NO: 800 - DNA, 22 bp, Homo sapiens
tcgctttccccttgctgctcca

SEQ ID NO: 801 - DNA, 36 bp, Homo sapiens
tgaaacctcggttgctcttcgtcgctctccacctcg

SEQ ID NO: 802 - DNA, 22 bp, Homo sapiens
cggttgctcttcgtcgctctcc

SEQ ID NO: 803 - DNA, 28 bp, Homo sapiens
gggtgaacggccacgagggacaccacgc

SEQ ID NO: 804 - DNA, 22 bp, Homo sapiens
acggccacgagggacaccacgc

SEQ ID NO: 805 - DNA, 22 bp, Homo sapiens
cgagcgggttgacggtggaggg

SEQ ID NO: 806 - DNA, 26 bp, Homo sapiens
ctccccgactccagcccgcaagccat

SEQ ID NO: 807 - DNA, 22 bp, Homo sapiens
ccccgactccagcccgcaagcc

SEQ ID NO: 808 - DNA, 42 bp, Homo sapiens
tcattctcgttgaagtcatcgtcctcctcgtcgtcctccccg

SEQ ID NO: 809 - DNA, 22 bp, Homo sapiens
gtcctcctcgtcgtcctccccg

SEQ ID NO: 810 - DNA, 23 bp, Homo sapiens
cgtgccgcccgcccagtgacatg

SEQ ID NO: 811 - DNA, 22 bp, Homo sapiens
cgtgccgcccgcccagtgacat

SEQ ID NO: 812 - DNA, 22 bp, Homo sapiens
gggttgtgggcttcgctcaggc

SEQ ID NO: 813 - DNA, 51 bp, Homo sapiens
  misc_feature 1-4: n= a, c, g, or t
nnnnggatccatgggacaggtcacagagtgcaacggtggctgagattcggg

SEQ ID NO: 814 - DNA, 22 bp, Homo sapiens
gcaacggtggctgagattcggg

SEQ ID NO: 815 - DNA, 42 bp, Homo sapiens
ctttagaagaataagccaggtttccacagcatcccccttgag

SEQ ID NO: 816 - DNA, 24 bp, Homo sapiens
agccaggtttccacagcatccccc

SEQ ID NO: 817 - DNA, 30 bp, Homo sapiens
catcctctgcggctggttcattctcctggg

SEQ ID NO: 818 - DNA, 22 bp, Homo sapiens
gcggctggttcattctcctggg

SEQ ID NO: 819 - DNA, 34 bp, Homo sapiens
cccttcccgttggtgacaggcagcgggaacatca

SEQ ID NO: 820 - DNA, 22 bp, Homo sapiens
cgttggtgacaggcagcgggaa

SEQ ID NO: 821 - DNA, 40 bp, Homo sapiens
gggtcaaaggaggagctgctctggtcgccgctgccccagg

SEQ ID NO: 822 - DNA, 22 bp, Homo sapiens
gctgctctggtcgccgctgccc

SEQ ID NO: 823 - DNA, 33 bp, Homo sapiens
cgccccgctcaccgctcttgcctccgagtcccg

SEQ ID NO: 824 - DNA, 22 bp, Homo sapiens
gccccgctcaccgctcttgcct

SEQ ID NO: 825 - DNA, 24 bp, Homo sapiens
gctgccgtctgccgctctccgccg

SEQ ID NO: 826 - DNA, 22 bp, Homo sapiens
tgccgtctgccgctctccgccg

SEQ ID NO: 827 - DNA, 31 bp, Homo sapiens
gggaccttccggaccttcttgggctgcgtgt

SEQ ID NO: 828 - DNA, 22 bp, Homo sapiens
cggaccttcttgggctgcgtgt

SEQ ID NO: 829 - DNA, 31 bp, Homo sapiens
gggtcttggcggacgggtaggcggtggcatc

SEQ ID NO: 830 - DNA, 22 bp, Homo sapiens
tggcggacgggtaggcggtggc

SEQ ID NO: 831 - DNA, 43 bp, Homo sapiens
caggccaccaaacgtgctgctgcttccactgctgcccaccggg

SEQ ID NO: 832 - DNA, 22 bp, Homo sapiens
gcttccactgctgcccaccggg

SEQ ID NO: 833 - DNA, 33 bp, Homo sapiens
ggtcgtcctcgtcctcgtctgggctggtccggg

SEQ ID NO: 834 - DNA, 22 bp, Homo sapiens
tcctcgtctgggctggtccggg

SEQ ID NO: 835 - DNA, 26 bp, Homo sapiens
ggccgcccccatcactccgaaccttg

SEQ ID NO: 836 - DNA, 22 bp, Homo sapiens
gccgcccccatcactccgaacc

SEQ ID NO: 837 - DNA, 42 bp, Homo sapiens
tcaaaaaaacaaaagacccgccgcctgtccccgtctgtctgt

SEQ ID NO: 838 - DNA, 22 bp, Homo sapiens
acccgccgcctgtccccgtctg

SEQ ID NO: 839 - DNA, 44 bp, Homo sapiens
gccaccttgctgacgtcccttcccccaagcccaggtcagtcccc

SEQ ID NO: 840 - DNA, 22 bp, Homo sapiens
ccccaagcccaggtcagtcccc

SEQ ID NO: 841 - DNA, 34 bp, Homo sapiens
ctggttctgcagcagggtcggagccacagcccaa

SEQ ID NO: 842 - DNA, 22 bp, Homo sapiens
gcagcagggtcggagccacagc

SEQ ID NO: 843 - DNA, 30 bp, Homo sapiens
gggaagccaccgagaagggagaggcagccg

SEQ ID NO: 844 - DNA, 24 bp, Homo sapiens
ccaccgagaagggagaggcagccg

SEQ ID NO: 845 - DNA, 23 bp, Homo sapiens
gggcagggcaggagcaaaacaag

SEQ ID NO: 846 - DNA, 21 bp, Homo sapiens
gggcagggcaggagcaaaaca

SEQ ID NO: 847 - DNA, 39 bp, Homo sapiens
ctgcggtgtggcgaagagcagcagctgagggtcgcaggg

SEQ ID NO: 848 - DNA, 22 bp, Homo sapiens
gcagcaggtcagggtcgcaggg

SEQ ID NO: 849 - DNA, 22 bp, Homo sapiens
gcggtgtggcgaagagcagcag

SEQ ID NO: 850 - DNA, 25 bp, Homo sapiens
tgcaccttcagcacctcggcagccc

SEQ ID NO: 851 - DNA, 22 bp, Homo sapiens
gcaccttcagcacctcggcagc

SEQ ID NO: 852 - DNA, 27 bp, Homo sapiens
gggtcaacccctcaagccgtccgccga

SEQ ID NO: 853 - DNA, 22 bp, Homo sapiens
caacccctcaagccgtccgccg

SEQ ID NO: 854 - DNA, 27 bp, Homo sapiens
aggtctctgatgccctcgccctcctcg

SEQ ID NO: 855 - DNA, 22 bp, Homo sapiens
tctgatgccctcgccctcctcg

SEQ ID NO: 856 - DNA, 37 bp, Homo sapiens
cgtcctacacgcccagccagccaaagcctccccacct

SEQ ID NO: 857 - DNA, 22 bp, Homo sapiens
cgcccagccagccaaagcctcc

SEQ ID NO: 858 - DNA, 44 bp, Homo sapiens
cactgcaggagggaccacagggtctgggctgggggaggccttca

SEQ ID NO: 859 - DNA, 22 bp, Homo sapiens
ccccacacccctcctccccttt

SEQ ID NO: 860 - DNA, 29 bp, Homo sapiens
ggccttcaccacccctcctgcccacatca

SEQ ID NO: 861 - DNA, 22 bp, Homo sapiens
gccttcaccacccctcctgccc

SEQ ID NO: 862 - DNA, 27 bp, Homo sapiens
gggttgggaactcagggacgacgggcc

SEQ ID NO: 863 - DNA, 22 bp, Homo sapiens
tgggaactcagggacgacgggc

SEQ ID NO: 864 - DNA, 31 bp, Homo sapiens
tggtgagcagccccagcgaagtgtcataccg

SEQ ID NO: 865 - DNA, 22 bp, Homo sapiens
ggtgagcagccccagcgaagtg

SEQ ID NO: 866 - DNA, 34 bp, Homo sapiens
tgatgctagggtggctgctgctgctgggctgggc

SEQ ID NO: 867 - DNA, 22 bp, Homo sapiens
cggtgctgctgctgggctgggc

SEQ ID NO: 868 - DNA, 36 bp, Homo sapiens
atcgctgatgccctcacccgcctccaagccccacag

SEQ ID NO: 869 - DNA, 22 bp, Homo sapiens
gccctcacccgcctccaagccc

SEQ ID NO: 870 - DNA, 30 bp, Homo sapiens
gggctgtctcgtcccgagggcaccgcgacc

SEQ ID NO: 871 - DNA, 22 bp, Homo sapiens
tcgtcccgagggcaccgcgacc

SEQ ID NO: 872 - DNA, 25 bp, Homo sapiens
ggaccctcccctcctggcccgcggc

SEQ ID NO: 873 - DNA, 22 bp, Homo sapiens
gaccctcccctcctggcccgcg

SEQ ID NO: 874 - DNA, 25 bp, Homo sapiens
ggaccctcccctcctggcccgcggc

SEQ ID NO: 875 - DNA, 22 bp, Homo sapiens
cctttcacacggcccgcggcat

SEQ ID NO: 876 - DNA, 22 bp, Homo sapiens
cgggtgacaggcggcggcggcg

SEQ ID NO: 877 - DNA, 21 bp, Homo sapiens
cgggtgacaggcggcggcggc

SEQ ID NO: 878 - DNA, 26 bp, Homo sapiens
ggtcaacccctcaagccgtccgccga

SEQ ID NO: 879 - DNA, 22 bp, Homo sapiens
caacccctcaagccgtccgccg

SEQ ID NO: 880 - DNA, 38 bp, Homo sapiens
gtcctacacgcccagccagccaaagcctccccacctgg

SEQ ID NO: 881 - DNA, 22 bp, Homo sapiens
cgcccagccagccaaagcctcc

SEQ ID NO: 882 - DNA, 22 bp, Homo sapiens
gctcgatcccgctccgcccccg

SEQ ID NO: 883 - DNA, 21 bp, Homo sapiens
gctcgatcccgctccgccccc

SEQ ID NO: 884 - DNA, 25 bp, Homo sapiens
gtccgccgacgcccactgtggtgtg

SEQ ID NO: 885 - DNA, 22 bp, Homo sapiens
tccgccgacgcccactgtggtg

SEQ ID NO: 886 - DNA, 22 bp, Homo sapiens
gggaggacggccagggacaggg

SEQ ID NO: 887 - DNA, 21 bp, Homo sapiens
gggaggacggccagggacagg

SEQ ID NO: 888 - DNA, 39 bp, Homo sapiens
gccgaaagtgcagttagagcccccccacgcgcacacatg

SEQ ID NO: 889 - DNA, 22 bp, Homo sapiens
agcccccccacgcgcacacatg

SEQ ID NO: 890 - DNA, 40 bp, Homo sapiens
gggccttcagctccttcttctcctcctccgagtggtcagc

SEQ ID NO: 891 - DNA, 22 bp, Homo sapiens
tctcctcctccgagtggtcagc

SEQ ID NO: 892 - DNA, 26 bp, Homo sapiens
ggccgcccccatcactccgaaccttg

SEQ ID NO: 893 - DNA, 22 bp, Homo sapiens
gccgcccccatcactccgaacc

SEQ ID NO: 894 - DNA, 36 bp, Homo sapiens
ctttagaagaataagccaggtttccacagcatcccc

SEQ ID NO: 895 - DNA, 22 bp, Homo sapiens
gccaggtttccacagcatcccc

SEQ ID NO: 896 - DNA, 25 bp, Homo sapiens
cgggccgacgaggagaaagaaaggg

SEQ ID NO: 897 - DNA, 22 bp, Homo sapiens
gccgacgaggagaaagaaaggg

SEQ ID NO: 898 - DNA, 33 bp, Homo sapiens
cttcgttatcgtgttcctgctctcgggccgacg

SEQ ID NO: 899 - DNA, 21 bp, Homo sapiens
tcgtgttcctgctctcgggcc

SEQ ID NO: 900 - DNA, 31 bp, Homo sapiens
catcaagagacgcctgctcctttttgacggt

SEQ ID NO: 901 - DNA, 22 bp, Homo sapiens
gacgcctgctcctttttgacgg

SEQ ID NO: 902 - DNA, 22 bp, Homo sapiens
cctcggtcatctcttggctccc

SEQ ID NO: 903 - DNA, 29 bp, Homo sapiens
gaatgaattcccgtttcctccgacatgca

SEQ ID NO: 904 - DNA, 22 bp, Homo sapiens
ttcccgtttcctccgacatgca

SEQ ID NO: 905 - DNA, 35 bp, Homo sapiens
cgggagcggcgacgggaaggcagcaggaggtggtg

SEQ ID NO: 906 - DNA, 23 bp, Homo sapiens
gcgacgggaaggcagcaggaggt

SEQ ID NO: 907 - DNA, 22 bp, Homo sapiens
cgggagcggcgacgggaaggca

SEQ ID NO: 908 - DNA, 27 bp, Homo sapiens
gctacacacaaagcgcttcagctgcac

SEQ ID NO: 909 - DNA, 24 bp, Homo sapiens
acacacaaagcgcttcagctgcac

SEQ ID NO: 910 - DNA, 22 bp, Homo sapiens
cctcgtacccgccggctgacgc

SEQ ID NO: 911 - DNA, 39 bp, Homo sapiens
atctgttaggttcaccacccctccaggtccaatgataaa

SEQ ID NO: 912 - DNA, 24 bp, Homo sapiens
ggttcaccacccctccaggtccaa

SEQ ID NO: 913 - DNA, 35 bp, Homo sapiens
ccagtgaattcggcggccgcggatccatttattta

SEQ ID NO: 914 - DNA, 22 bp, Homo sapiens
gaattcggcggccgcggatcca

SEQ ID NO: 915 - DNA, 36 bp, Homo sapiens
cggcgcccaaaatccccaccgaaaagtcccccgtcg

SEQ ID NO: 916 - DNA, 23 bp, Homo sapiens
tccccaccgaaaagtcccccgtc

SEQ ID NO: 917 - DNA, 24 bp, Homo sapiens
cggcgcccaaaatccccaccgaaa

SEQ ID NO: 918 - DNA, 35 bp, Homo sapiens; identical to SEQ ID NO: 905

SEQ ID NO: 919 - DNA, 22 bp, Homo sapiens
cgggagcggcgacgggaaggca

SEQ ID NO: 920 - DNA, 23 bp, Homo sapiens
cgggaaggcagcaggaggtggtg

SEQ ID NO: 921 - DNA, 33 bp, Homo sapiens
gaaaagtcccccgtcgtgcgcgcggagggacac

SEQ ID NO: 922 - DNA, 22 bp, Homo sapiens
cgtcgtgcgcgcggagggacac

SEQ ID NO: 923 - DNA, 19 bp, Homo sapiens
gtcccccgtcgtgcgcgcg

SEQ ID NO: 924 - DNA, 26 bp, Homo sapiens
ttttccgaaaatgccgcgtctggtcg

SEQ ID NO: 925 - DNA, 22 bp, Homo sapiens
ccgaaaatgccgcgtctggtcg

SEQ ID NO: 926 - DNA, 24 bp, Homo sapiens
gctgacgcggccccgctacacaca

SEQ ID NO: 927 - DNA, 25 bp, Homo sapiens
cctcgtacccggccgggctgacgcg

SEQ ID NO: 928 - DNA, 23 bp, Homo sapiens
tcgtacccggccgggctgacgcg

SEQ ID NO: 929 - DNA, 35 bp, Homo sapiens
acctctactatgctggcatggccctcagaagctgc

SEQ ID NO: 930 - DNA, 24 bp, Homo sapiens
gctggcatggccctcagaagctgc

SEQ ID NO: 931 - DNA, 30 bp, Homo sapiens
gttaggttcaccacccctccaggtccaatg

SEQ ID NO: 932 - DNA, 24 bp, Homo sapiens
ggttcaccacccctccaggtccaa

SEQ ID NO: 933 - DNA, 32 bp, Homo sapiens
ctgagaacggcagcggcgagggctccacgtgc

SEQ ID NO: 934 - DNA, 22 bp, Homo sapiens
tgagaacggcagcggcgagggc

SEQ ID NO: 935 - DNA, 32 bp, Homo sapiens
gccctgtcgcccccgcccgcactccagagccg

SEQ ID NO: 936 - DNA, 22 bp, Homo sapiens
ccccgcccgcactccagagccg

SEQ ID NO: 937 - DNA, 39 bp, Homo sapiens
tccagagaatttctccccgaggaacccgctgaaaaaaat

SEQ ID NO: 938 - DNA, 22 bp, Homo sapiens
tctccccgaggaacccgctgaa

SEQ ID NO: 939 - DNA, 20 bp, Homo sapiens
cggaatcggcgctgagaagc

SEQ ID NO: 940 - DNA, 33 bp, Homo sapiens
cctatagccttccagtgcagcagcccatcttgt

SEQ ID NO: 941 - DNA, 23 bp, Homo sapiens
gccttccagtgcagcagcccatc

SEQ ID NO: 942 - DNA, 31 bp, Homo sapiens
gcggtggttgtggcgttggcggcgaggcggg

SEQ ID NO: 943 - DNA, 22 bp, Homo sapiens
ttgtggcgttggcggcgaggcg

SEQ ID NO: 944 - DNA, 38 bp, Homo sapiens
atcgatggtacatatgggtggctgagggaggcgttctc

SEQ ID NO: 945 - DNA, 23 bp, Homo sapiens
tgggtggctgagggaggcgttct

SEQ ID NO: 946 - DNA, 29 bp, Homo sapiens
ggccgtcccggagggtcgcatcgctgctc

SEQ ID NO: 947 - DNA, 22 bp, Homo sapiens
ccgtcccggagggtcgcatcgc

SEQ ID NO: 948 - DNA, 25 bp, Homo sapiens
ccaggagcgctgccccggccgtccc

SEQ ID NO: 949 - DNA, 22 bp, Homo sapiens
ccaggagcgctgccccggccgt

SEQ ID NO: 950 - DNA, 29 bp, Homo sapiens
cgaacgcaccggagcccagcactttgatc

SEQ ID NO: 951 - DNA, 22 bp, Homo sapiens
cgaacgcaccggagcccagcac

SEQ ID NO: 952 - DNA, 44 bp, Homo sapiens
cgaggcggcggtggaggtggtggtggcggtggcggcggcagcac

SEQ ID NO: 953 - DNA, 21 bp, Homo sapiens
cgaggcggcggtggaggtggt

SEQ ID NO: 954 - DNA, 22 bp, Homo sapiens
ggtggcggtggcggcggcagca

SEQ ID NO: 955 - DNA, 46 bp, Homo sapiens
ctgtgtgtagcgtggcggtggcgttggcaatgttggcagctccggg

SEQ ID NO: 956 - DNA, 22 bp, Homo sapiens
tggcaatgttggcagctccggg

SEQ ID NO: 957 - DNA, 22 bp, Homo sapiens
agcgtggcggtggcgttggcaa

SEQ ID NO: 958 - DNA, 36 bp, Homo sapiens
gggtactgttaaagagggatgcggaggagtgcggcg

SEQ ID NO: 959 - DNA, 22 bp, Homo sapiens
agggatgcggaggagtgcggcg

SEQ ID NO: 960 - DNA, 25 bp, Homo sapiens
gcccctgcgtttccctacagctcgg

SEQ ID NO: 961 - DNA, 31 bp, Homo sapiens
ccacagccgggccacctcctctgcatccacc

SEQ ID NO: 962 - DNA, 22 bp, Homo sapiens
cagccgggccacctcctctgca

SEQ ID NO: 963 - DNA, 31 bp, Homo sapiens
gcgcggccgcttgtcctctttgttcgggttc

SEQ ID NO: 964 - DNA, 22 bp, Homo sapiens
cgcttgtcctctttgttcgggt

SEQ ID NO: 965 - DNA, 30 bp, Homo sapiens
ggccagcgtgttcttgttgcccgtggcctt

SEQ ID NO: 966 - DNA, 22 bp, Homo sapiens
gccagcgtgttcttgttgcccg

SEQ ID NO: 967 - DNA, 30 bp, Homo sapiens
gccctccttggctgtggtggagtggttgta

SEQ ID NO: 968 - DNA, 22 bp, Homo sapiens
ccttggctgtggtggagtggtt

SEQ ID NO: 969 - DNA, 27 bp, Homo sapiens
catgccccccgccctactcgctgtccg

SEQ ID NO: 970 - DNA, 22 bp, Homo sapiens
cccccgccctactcgctgtccg

SEQ ID NO: 971 - DNA, 38 bp, Homo sapiens
ccctgacattggcttaaacatcactccaggcacaactc

SEQ ID NO: 972 - DNA, 22 bp, Homo sapiens
aacatcactccaggcacaactc

SEQ ID NO: 973 - DNA, 36 bp, Homo sapiens
gggtagttgtacacggcgggcttgctgctgtccagg

SEQ ID NO: 974 - DNA, 22 bp, Homo sapiens
cacggcgggcttgctgctgtcc

SEQ ID NO: 975 - DNA, 31 bp, Homo sapiens
gttggagccgaacgccgcagcctcagacccg

SEQ ID NO: 976 - DNA, 22 bp, Homo sapiens
gaacgccgcagcctcagacccg

SEQ ID NO: 977 - DNA, 39 bp, Homo sapiens
tctccagcagaccccacttcacccctgccctccccatca

SEQ ID NO: 978 - DNA, 22 bp, Homo sapiens
ccacttcacccctgccctcccc

SEQ ID NO: 979 - DNA, 25 bp, Homo sapiens
gggaaaccctctgcctcccccgtga

SEQ ID NO: 980 - DNA, 22 bp, Homo sapiens
aaaccctctgcctcccccgtga

SEQ ID NO: 981 - DNA, 52 bp, Homo sapiens
aaaggaaattgaaggaaatgagctggcaggagtggaggcggtagggaacggg

SEQ ID NO: 982 - DNA, 22 bp, Homo sapiens
ggcaggagtggaggcggtaggg

SEQ ID NO: 983 - DNA, 43 bp, Homo sapiens
ccagattcctgaatccacttccccaccatacctgagcccccca

SEQ ID NO: 984 - DNA, 22 bp, Homo sapiens
ccccaccatacctgagcccccc

SEQ ID NO: 985 - DNA, 25 bp, Homo sapiens
gacgaacgccctccgccagctcctg

SEQ ID NO: 986 - DNA, 22 bp, Homo sapiens
cgaacgccctccgccagctcct

SEQ ID NO: 987 - DNA, 22 bp, Homo sapiens
gagcctgcggtccggtgaagcc

SEQ ID NO: 988 - DNA, 26 bp, Homo sapiens
gccgacacgcgagctctggccccggc

SEQ ID NO: 989 - DNA, 22 bp, Homo sapiens
acacgcgagctctggccccggc

SEQ ID NO: 990 - DNA, 33 bp, Homo sapiens
gggctgcaggaaaggcgacagctgcggcggcgg

SEQ ID NO: 991 - DNA, 22 bp, Homo sapiens
aaggcgacagctgcggcggcgg

SEQ ID NO: 992 - DNA, 29 bp, Homo sapiens
caaagttgctggagacccctgggcgaaca

SEQ ID NO: 993 - DNA, 22 bp, Homo sapiens
ttgctggagacccctgggcgaa

SEQ ID NO: 994 - DNA, 39 bp, Homo sapiens
tttctctgtgagtcatttgtcttgctttggagggaattc

SEQ ID NO: 995 - DNA, 22 bp, Homo sapiens
tgtcttgctttggagggaattc

SEQ ID NO: 996 - DNA, 27 bp, Homo sapiens
gggctgcccaccatcttcccgcctttg

SEQ ID NO: 997 - DNA, 22 bp, Homo sapiens
gctgcccaccatcttcccgcct

SEQ ID NO: 998 - DNA, 56 bp, Homo sapiens
taacaagatgttgacgtctggaaggccatattctttcaccgcccactccagccact

SEQ ID NO: 999 - DNA, 22 bp, Homo sapiens
ctttcaccgcccactccagcca

SEQ ID NO: 1000 - DNA, 44 bp, Homo sapiens
gcttatcgtagttcatgttgggtttgctcttccgctctccccag

SEQ ID NO: 1001 - DNA, 22 bp, Homo sapiens
ggtttgctcttccgctctcccc

SEQ ID NO: 1002 - DNA, 38 bp, Homo sapiens
cacaaagttcatcttctgtgggtgggcgtgataggagc

SEQ ID NO: 1003 - DNA, 22 bp, Homo sapiens
tgtgggtgggcgtgataggagc

SEQ ID NO: 1004 - DNA, 58 bp, Homo sapiens
tgaggcacttttgattcatgttctccgatagagtttgtggcgatgggctggtgaatgc

SEQ ID NO: 1005 - DNA, 22 bp, Homo sapiens
gtggcgatgggctggtgaatgc

SEQ ID NO: 1006 - DNA, 26 bp, Homo sapiens
gccgcctacccaaaatgcctgcgtga

SEQ ID NO: 1007 - DNA, 22 bp, Homo sapiens
gccgcctacccaaaatgcctgc

SEQ ID NO: 1008 - DNA, 44 bp, Homo sapiens
atttgtcttgcttttggtcaacacggctttcctcgggtctccaa

SEQ ID NO: 1009 - DNA, 22 bp, Homo sapiens
cacggctttcctcgggtctcca

SEQ ID NO: 1010 - DNA, 56 bp, Homo sapiens
ccaggtgtggcgttccgtaggcagggctgcccaccatcttcccgcctttggccaca

SEQ ID NO: 1011 - DNA, 22 bp, Homo sapiens
gctgcccaccatcttcccgcct

SEQ ID NO: 1012 - DNA, 42 bp, Homo sapiens
ggaaggccatattctttcaccgcccactccagccactgccgc

SEQ ID NO: 1013 - DNA, 22 bp, Homo sapiens
ctttcaccgcccactccagcca

SEQ ID NO: 1014 - DNA, 22 bp, Homo sapiens
cgcccactccagccactgccgc

SEQ ID NO: 1015 - DNA, 47 bp, Homo sapiens
gattcatgttctccgatagagtttgtggcgatgggctggtgaatgca

SEQ ID NO: 1016 - DNA, 22 bp, Homo sapiens
gtggcgatgggctggtgaatgc

SEQ ID NO: 1017 - DNA, 23 bp, Homo sapiens
cttccttccccagccccagtaaa

SEQ ID NO: 1018 - DNA, 22 bp, Homo sapiens
ttccttccccagccccagtaaa

SEQ ID NO: 1019 - DNA, 49 bp, Homo sapiens
tcgcgactcaaaggaaaactggaggccgcctacccaaaatgcctgcgtg

SEQ ID NO: 1020 - DNA, 22 bp, Homo sapiens
gccgcctacccaaaatgcctgc

SEQ ID NO: 1021 - DNA, 90 bp, Homo sapiens
gctccccgcccccgcccccctgagccgccgccgccgccatctccactcccgctgctgctgctgctgctgttgctgccgctgccctctggg

SEQ ID NO: 1022 - DNA, 22 bp, Homo sapiens
gctgctgttgctgccgctgccc

SEQ ID NO: 1023 - DNA, 22 bp, Homo sapiens
ccgccgccatctccactcccgc

SEQ ID NO: 1024 - DNA, 22 bp, Homo sapiens
ccgcccccctgagccgccgccg

SEQ ID NO: 1025 - DNA, 33 bp, Homo sapiens
gcagcagcagcagcagcgggagattgaactggg

SEQ ID NO: 1026 - DNA, 22 bp, Homo sapiens
cgcagcagcagcagcagcggga

SEQ ID NO: 1027 - DNA, 45 bp, Homo sapiens
gagtccctactcagcgccccccaccctccacctctgcccttcagc

SEQ ID NO: 1028 - DNA, 22 bp, Homo sapiens
cccccaccctccacctctgccc

SEQ ID NO: 1029 - DNA, 35 bp, Homo sapiens
atttatatattagacgggtcagggaggtggcaggg

SEQ ID NO: 1030 - DNA, 22 bp, Homo sapiens
acgggtcagggaggtggcaggg

SEQ ID NO: 1031 - DNA, 33 bp, Homo sapiens
gatctggatctcccggagcgtgcgctggcagta

SEQ ID NO: 1032 - DNA, 22 bp, Homo sapiens
tctcccggagcgtgcgctggca

SEQ ID NO: 1033 - DNA, 24 bp, Homo sapiens
ggccaggcccatgctccaccccgg

SEQ ID NO: 1034 - DNA, 22 bp, Homo sapiens
gccaggcccatgctccaccccg

SEQ ID NO: 1035 - DNA, 19 bp, Homo sapiens
gggcgccgggctctccacg

SEQ ID NO: 1036 - DNA, 19 bp, Homo sapiens
gggcgccgggctctccacg

SEQ ID NO: 1037 - DNA, 75 bp, Homo sapiens
cgacgctgaccgggagaggaaggaagacgcgagcgagagctgaagagccgacaccactggaccattcctcgaatt

SEQ ID NO: 1038 - DNA, 22 bp, Homo sapiens
ccactggaccattcctcgaatt

SEQ ID NO: 1039 - DNA, 22 bp, Homo sapiens
gcgagcgagagctgaagagccg

SEQ ID NO: 1040 - DNA, 22 bp, Homo sapiens
ccgggagaggaaggaagacgcg

SEQ ID NO: 1041 - DNA, 41 bp, Homo sapiens
cctcagctcttgtcgcccctcccgcagactgcccgccgccg

SEQ ID NO: 1042 - DNA, 21 bp, Homo sapiens
gcccctcccgcagactgcccg

SEQ ID NO: 1043 - DNA, 22 bp, Homo sapiens
gctcttgtcgcccctcccgcag

SEQ ID NO: 1044 - DNA, 40 bp, Homo sapiens
gcataaaagccacaactaccagaaaccgcccctccaaacg

SEQ ID NO: 1045 - DNA, 22 bp, Homo sapiens
ccagaaaccgcccctccaaacg

SEQ ID NO: 1046 - DNA, 28 bp, Homo sapiens
ggacatccccagaaaccgcccacagctc

SEQ ID NO: 1047 - DNA, 22 bp, Homo sapiens
ccccagaaaccgcccacagctc

SEQ ID NO: 1048 - DNA, 45 bp, Homo sapiens
ggtgtagcgcggccccacgtcgaacacctgcccgcggaccatctc

SEQ ID NO: 1049 - DNA, 22 bp, Homo sapiens
tcgaacacctgcccgcggacca

SEQ ID NO: 1050 - DNA, 22 bp, Homo sapiens
gcgcggccccacgtcgaacacc

SEQ ID NO: 1051 - DNA, 35 bp, Homo sapiens
tggatctgcaacacgggccaggccaaagtcacaga

SEQ ID NO: 1052 - DNA, 22 bp, Homo sapiens
tctgcaacacgggccaggccaa

SEQ ID NO: 1053 - DNA, 44 bp, Homo sapiens
gtcgagagatgaagaccatggcgcgggcgagtgtagggctggcg

SEQ ID NO: 1054 - DNA, 22 bp, Homo sapiens
gcgggcgagtgtagggctggcg

SEQ ID NO: 1055 - DNA, 39 bp, Homo sapiens
cataaaagccacaactaccagaaaccgcccctccaaacg

SEQ ID NO: 1056 - DNA, 22 bp, Homo sapiens
ccagaaaccgcccctccaaacg

SEQ ID NO: 1057 - DNA, 29 bp, Homo sapiens
ggacatccccagaaaccgcccacagctca

SEQ ID NO: 1058 - DNA, 22 bp, Homo sapiens
ccccagaaaccgcccacagcta

SEQ ID NO: 1059 - DNA, 27 bp, Homo sapiens
ccgcggcggcccatcacgaggtcgaga

SEQ ID NO: 1060 - DNA, 22 bp, Homo sapiens
gcggcggcccatcacgaggtcg

SEQ ID NO: 1061 - DNA, 24 bp, Homo sapiens
cgggcatcgctcagggcaatcttc

SEQ ID NO: 1062 - DNA, 22 bp, Homo sapiens
cgggcatcgctcagggcaatct

SEQ ID NO: 1063 - DNA, 25 bp, Homo sapiens
cgcccccgtgtccgccagccccgtg

SEQ ID NO: 1064 - DNA, 22 bp, Homo sapiens
gcccccgtgtccgccagccccg

SEQ ID NO: 1065 - DNA, 35 bp, Homo sapiens
gggtcgtcggcgggcgggctggcgtgctgtgggcg

SEQ ID NO: 1066 - DNA, 22 bp, Homo sapiens
gcgggctggcgtgctctgggcg

SEQ ID NO: 1067 - DNA, 24 bp, Homo sapiens
gcccctccgccctcaccacctttc

SEQ ID NO: 1068 - DNA, 22 bp, Homo sapiens
gcccctccgccctcaccacctt

SEQ ID NO: 1069 - DNA, 28 bp, Homo sapiens
ccaaggcagcagagagggcggaggcggc

SEQ ID NO: 1070 - DNA, 22 bp, Homo sapiens
cagcagagagggcggaggcggc

SEQ ID NO: 1071 - DNA, 45 bp, Homo sapiens
gacattcccctcaaactgcttcccgccccctcctcccaactgcgg

SEQ ID NO: 1072 - DNA, 22 bp, Homo sapiens
cgccccctcctcccaactgcgg

SEQ ID NO: 1073 - DNA, 22 bp, Homo sapiens
ccgcccttccgtcaaactcccc

SEQ ID NO: 1074 - DNA, 34 bp, Homo sapiens
tttctgcccctccctgttcccactccccagccaa

SEQ ID NO: 1075 - DNA, 23 bp, Homo sapiens
gcccctccctgttcccactcccc

SEQ ID NO: 1076 - DNA, 24 bp, Homo sapiens
acgtccgccaagcgtctcttctcg

SEQ ID NO: 1077 - DNA, 36 bp, Homo sapiens
ttctgtcaatcacaggccgccctctgcattcctcag

SEQ ID NO: 1078 - DNA, 22 bp, Homo sapiens
cacaggccgccctctgcattcc

SEQ ID NO: 1079 - DNA, 31 bp, Homo sapiens
tggatgccccagcgccgagcaacctcttccg

SEQ ID NO: 1080 - DNA, 22 bp, Homo sapiens
tggatgccccagcgccgagcaa

SEQ ID NO: 1081 - DNA, 37 bp, Homo sapiens
ctgaattcattcacagcccacatcacccagtcccgaa

SEQ ID NO: 1082 - DNA, 22 bp, Homo sapiens
cagcccacatcacccagtcccg

SEQ ID NO: 1083 - DNA, 34 bp, Homo sapiens
cgaggtatagcgggattctggataggctgggttg

SEQ ID NO: 1084 - DNA, 22 bp, Homo sapiens
gcgggattctggataggctggg

SEQ ID NO: 1085 - DNA, 29 bp, Homo sapiens
cccttgggcttgtggttgggcagggcagc

SEQ ID NO: 1086 - DNA, 22 bp, Homo sapiens
gggcttgtggttgggcagggca

SEQ ID NO: 1087 - DNA, 32 bp, Homo sapiens
cggcttgagatcgacggccgccttcatggtgc

SEQ ID NO: 1088 - DNA, 22 bp, Homo sapiens
tcgacggccgccttcatggtgc

SEQ ID NO: 1089 - DNA, 43 bp, Homo sapiens
actttcctggacattttcaatcctgcctttcctgggtcctcgg

SEQ ID NO: 1090 - DNA, 22 bp, Homo sapiens
cctgcctttcctgggtcctcgg

SEQ ID NO: 1091 - DNA, 37 bp, Homo sapiens
tgagaatctcaaacagccagaaccatcccgtcccacg

SEQ ID NO: 1092 - DNA, 22 bp, Homo sapiens
cagccagaaccatcccgtccca

SEQ ID NO: 1093 - DNA, 41 bp, Homo sapiens
gtttcatcaagacccctaccgccccccgtccttcagctctg

SEQ ID NO: 1094 - DNA, 22 bp, Homo sapiens
ccctaccgccccccgtccttca

SEQ ID NO: 1095 - DNA, 22 bp, Homo sapiens
tcaagacccctaccgccccccg

SEQ ID NO: 1096 - DNA, 40 bp, Homo sapiens
ttttctccgaatgaatggctccgatgctttccctttccca

SEQ ID NO: 1097 - DNA, 23 bp, Homo sapiens
tggctccgatgctttccctttcc

SEQ ID NO: 1098 - DNA, 43 bp, Homo sapiens
caggaggattctttacagatgtcagccacccgtccaaggccac

SEQ ID NO: 1099 - DNA, 22 bp, Homo sapiens
gatgtcagccacccgtccaagg

SEQ ID NO: 1100 - DNA, 30 bp, Homo sapiens
ccaccggcgggccacctttggtgaacatgg

SEQ ID NO: 1101 - DNA, 22 bp, Homo sapiens
ccggcgggccacctttggtgaa

SEQ ID NO: 1102 - DNA, 24 bp, Homo sapiens
cgtcccacggactgccaggcgcca

SEQ ID NO: 1103 - DNA, 22 bp, Homo sapiens
cgtcccacggactgccaggcgc

SEQ ID NO: 1104 - DNA, 23 bp, Homo sapiens
ctcttcccagcttgcccggccac

SEQ ID NO: 1105 - DNA, 22 bp, Homo sapiens
cttcccagcttgcccggccacc

SEQ ID NO: 1106 - DNA, 25 bp, Homo sapiens
gggcaccattttctcgggcggctcc

SEQ ID NO: 1107 - DNA, 41 bp, Homo sapiens
ccttgcgagccgcccccaccactgccgccgttgctcttggg

SEQ ID NO: 1108 - DNA, 22 bp, Homo sapiens
ccccaccactgccgccgttgct

SEQ ID NO: 1109 - DNA, 37 bp, Homo sapiens
caatctgctctcgggtgaaggcggtgcggtaacgacg

SEQ ID NO: 1110 - DNA, 22 bp, Homo sapiens
gctctcgggtgaaggcggtgcg

SEQ ID NO: 1111 - DNA, 24 bp, Homo sapiens
gctgaagggcgaggcggcggcgga

SEQ ID NO: 1112 - DNA, 22 bp, Homo sapiens
gctgaagggcgaggcggcggcg

SEQ ID NO: 1113 - DNA, 29 bp, Homo sapiens
cggggtagagcggcgggtggcggaaggcg

SEQ ID NO: 1114 - DNA, 22 bp, Homo sapiens
agagcggcgggtggcggaaggc

SEQ ID NO: 1115 - DNA, 44 bp, Homo sapiens
gggcgaggagcgaggagcgaggaggcgaggctggctgagtcccg

SEQ ID NO: 1116 - DNA, 22 bp, Homo sapiens
gcgaggaggcgaggctggctga

SEQ ID NO: 1117 - DNA, 22 bp, Homo sapiens
gcgaggagcgaggaggcgaggc

SEQ ID NO: 1118 - DNA, 48 bp, Homo sapiens
ggatcccgctggtccttttccgccctctcctttcccccttggcgtcct

SEQ ID NO: 1119 - DNA, 22 bp, Homo sapiens
ccctctcctttcccccttggcg

SEQ ID NO: 1120 - DNA, 22 bp, Homo sapiens
tcccgctggtccttttccgccc

SEQ ID NO: 1121 - DNA, 31 bp, Homo sapiens
tacttctctccgaccaagcccaaccccgagt

SEQ ID NO: 1122 - DNA, 21 bp, Homo sapiens
ccgaccaagcccaaccccgag

SEQ ID NO: 1123 - DNA, 29 bp, Homo sapiens
ggtggcggccgcgtgcgtcatcatgtagg

SEQ ID NO: 1124 - DNA, 23 bp, Homo sapiens
ggccgcgtgcgtcatcatgtagg

SEQ ID NO: 1125 - DNA, 30 bp, Homo sapiens
cgctcccgccgctgcctccgctgcctccat

SEQ ID NO: 1126 - DNA, 22 bp, Homo sapiens
gctcccgccgctgcctccgctg

SEQ ID NO: 1127 - DNA, 28 bp, Homo sapiens
cgcgccagagccggagccacccagcgcc

SEQ ID NO: 1128 - DNA, 22 bp, Homo sapiens
cgcgccagagccggagccaccc

SEQ ID NO: 1129 - DNA, 30 bp, Homo sapiens
ccttgatggtggtttcgggcaggttgagtg

SEQ ID NO: 1130 - DNA, 22 bp, Homo sapiens
tggtggtttcgggcaggttgag

SEQ ID NO: 1131 - DNA, 33 bp, Homo sapiens
gctgagtttgagggcgtgggcgatctgcgagcg

SEQ ID NO: 1132 - DNA, 22 bp, Homo sapiens
gctgagtttgagggcgtgggcg

SEQ ID NO: 1133 - DNA, 36 bp, Homo sapiens
cccgtagacgtggtgctgcccgcgcgccgctgctcg

SEQ ID NO: 1134 - DNA, 22 bp, Homo sapiens
cgtggtgctgcccgcgcgccgc

SEQ ID NO: 1135 - DNA, 31 bp, Homo sapiens
gctcgctggtgaaggcagtccgccgccgccg

SEQ ID NO: 1136 - DNA, 22 bp, Homo sapiens
ctcgctggtgaaggcagtccgc

SEQ ID NO: 1137 - DNA, 29 bp, Homo sapiens
cattgcctgccttcacccgtttccacttg

SEQ ID NO: 1138 - DNA, 22 bp, Homo sapiens
tgcctgccttcacccgtttcca

SEQ ID NO: 1139 - DNA, 37 bp, Homo sapiens
ctcagggtgtgttccgtgccagtgcccgcccctgagg

SEQ ID NO: 1140 - DNA, 22 bp, Homo sapiens
ccgtgccagtgcccgcccctga

SEQ ID NO: 1141 - DNA, 32 bp, Homo sapiens
ggtccaccaacccgcgggagaagaggcagctc

SEQ ID NO: 1142 - DNA, 22 bp, Homo sapiens
ccaacccgcgggagaagaggca

SEQ ID NO: 1143 - DNA, 22 bp, Homo sapiens
ggtccaccaacccgcgggagaa

SEQ ID NO: 1144 - DNA, 35 bp, Homo sapiens
gtcactcgtaaaccgcttccctcactccccagaag

SEQ ID NO: 1145 - DNA, 22 bp, Homo sapiens
ccgcttccctcactccccagaa

SEQ ID NO: 1146 - DNA, 28 bp, Homo sapiens
gagtccgtcctctcgttcgccgccgccg

SEQ ID NO: 1147 - DNA, 22 bp, Homo sapiens
ccgtcctctcgttcgccgccgc

SEQ ID NO: 1148 - DNA, 42 bp, Homo sapiens
gcattgctgagccccgtccccctccgtgcccacatggtgcgt

SEQ ID NO: 1149 - DNA, 22 bp, Homo sapiens
ccctccgtgcccacatggtgcg

SEQ ID NO: 1150 - DNA, 22 bp, Homo sapiens
tgctgagccccgtccccctccg

SEQ ID NO: 1151 - DNA, 25 bp, Homo sapiens
gggaggagccgagaggagtgtccgc

SEQ ID NO: 1152 - DNA, 22 bp, Homo sapiens
aggagccgagaggagtgtccgc

SEQ ID NO: 1153 - DNA, 24 bp, Homo sapiens
gagcccgctccgagccgccgccgc

SEQ ID NO: 1154 - DNA, 22 bp, Homo sapiens
gagcccgctccgagccgccgcc

SEQ ID NO: 1155 - DNA, 22 bp, Homo sapiens
cccgctggccgctgcacccgag

SEQ ID NO: 1156 - DNA, 23 bp, Homo sapiens
cgcgctcccccggccaacgaccc

SEQ ID NO: 1157 - DNA, 22 bp, Homo sapiens
cgcgctcccccggccaacgacc

SEQ ID NO: 1158 - DNA, 30 bp, Homo sapiens
ctgaccatggtgagcgcgacgcggcctgct

SEQ ID NO: 1159 - DNA, 22 bp, Homo sapiens
tggtgagcgcgacgcggcctgc

SEQ ID NO: 1160 - DNA, 39 bp, Homo sapiens
gcagacagctgagcagcgcgcacagcaggaccccggtgt

SEQ ID NO: 1161 - DNA, 22 bp, Homo sapiens
cagcgcgcacagcaggaccccg

SEQ ID NO: 1162 - DNA, 44 bp, Homo sapiens
gccctcgcagtctcgcaccacccccgtgtcctcgctgtccttgt

SEQ ID NO: 1163 - DNA, 22 bp, Homo sapiens
cgcaccacccccgtgtcctcgc

SEQ ID NO: 1164 - DNA, 22 bp, Homo sapiens
tcgcagtctcgcaccacccccg

SEQ ID NO: 1165 - DNA, 36 bp, Homo sapiens
gcacccacttaccccgctctgcctgcttccctgggt

SEQ ID NO: 1166 - DNA, 22 bp, Homo sapiens
ccgctctgcctgcttccctggg

SEQ ID NO: 1167 - DNA, 41 bp, Homo sapiens
catgaggtcttgctgctgccgccgccggagactacgctggg

SEQ ID NO: 1168 - DNA, 22 bp, Homo sapiens
cgccgccggagactacgctggg

SEQ ID NO: 1169 - DNA, 22 bp, Homo sapiens
ggtcttgctgctgccgccgccg

SEQ ID NO: 1170 - DNA, 29 bp, Homo sapiens
acagctgctgcccttgtggatgccgaaag

SEQ ID NO: 1171 - DNA, 22 bp, Homo sapiens
gctgctgcccttgtggatgccg

SEQ ID NO: 1172 - DNA, 35 bp, Homo sapiens
cagttcagcatgatgtggcgtatggcgggagtggc

SEQ ID NO: 1173 - DNA, 22 bp, Homo sapiens
tgtggcgtatggcgggagtggc

SEQ ID NO: 1174 - DNA, 36 bp, Homo sapiens
ttaccaaggaataatcggcgggcacagggtcaggtg

SEQ ID NO: 1175 - DNA, 22 bp, Homo sapiens
tcggcgggcacagggtcaggtg

SEQ ID NO: 1176 - DNA, 29 bp, Homo sapiens
cgctgcatctccggccgctgcgcgtgggt

SEQ ID NO: 1177 - DNA, 22 bp, Homo sapiens
tctccggccgctgcgcgtgggt

SEQ ID NO: 1178 - DNA, 31 bp, Homo sapiens
gccgtggtgccctcgatgcgtgccttgatgt

SEQ ID NO: 1179 - DNA, 22 bp, Homo sapiens
cgtggtgccctcgatgcgtgcc

SEQ ID NO: 1180 - DNA, 37 bp, Homo sapiens
gcgtggacacgagcatgccccgccggtcatcccacac

SEQ ID NO: 1181 - DNA, 22 bp, Homo sapiens
tgccccgccggtcatcccacac

SEQ ID NO: 1182 - DNA, 22 bp, Homo sapiens
ggacacgagcatgccccgccgg

SEQ ID NO: 1183 - DNA, 26 bp, Homo sapiens
tctgttgggagcgtcgctcgggcacc

SEQ ID NO: 1184 - DNA, 22 bp, Homo sapiens
ttgggagcgtcgctcgggcacc

SEQ ID NO: 1185 - DNA, 42 bp, Homo sapiens
cttcaccagctcgtctcctgccgtggcctccaggatgggtcc

SEQ ID NO: 1186 - DNA, 22 bp, Homo sapiens
tgccgtggcctccaggatgggt

SEQ ID NO: 1187 - DNA, 22 bp, Homo sapiens
cagctcgtctcctgccgtggcc

SEQ ID NO: 1188 - DNA, 35 bp, Homo sapiens
caaacatcttgcagggtgtccagggccgccagtgc

SEQ ID NO: 1189 - DNA, 22 bp, Homo sapiens
tgcagggtgtccagggccgcca

SEQ ID NO: 1190 - DNA, 41 bp, Homo sapiens
ctgtcggcttggcagctcaggagcaccggctggccctctag

SEQ ID NO: 1191 - DNA, 22 bp, Homo sapiens
gctcaggagcaccggctggccc

SEQ ID NO: 1192 - DNA, 22 bp, Homo sapiens
ttggcagctcaggagcaccggc

SEQ ID NO: 1193 - DNA, 22 bp, Homo sapiens
cgcgtgcgctccggccaccaag

SEQ ID NO: 1194 - DNA, 30 bp, Homo sapiens
gccgtggcgccctctttcagcattttcacg

SEQ ID NO: 1195 - DNA, 22 bp, Homo sapiens
gccgtggcgccctctttcagca

SEQ ID NO: 1196 - DNA, 35 bp, Homo sapiens
gaagaggaccctgtcgctgctccccggccgcctcc

SEQ ID NO: 1197 - DNA, 22 bp, Homo sapiens
tcgctgctccccggccgcctcc

SEQ ID NO: 1198 - DNA, 37 bp, Homo sapiens
tccttccgggattttgcagatgggtcggtgggcttcc

SEQ ID NO: 1199 - DNA, 22 bp, Homo sapiens
gcagatgggtcggtgggcttcc

SEQ ID NO: 1200 - DNA, 43 bp, Homo sapiens
gccactggtactgcctgtgtccccctccttggctccttccggg

SEQ ID NO: 1201 - DNA, 22 bp, Homo sapiens
ctgcctgtgtccccctccttgg

SEQ ID NO: 1202 - DNA, 37 bp, Homo sapiens
ggatgggtctccgctgctgctgctactcttgcgatga

SEQ ID NO: 1203 - DNA, 22 bp, Homo sapiens
gatgggtctccgctgctgctgc

SEQ ID NO: 1204 - DNA, 26 bp, Homo sapiens
cgccgccgccgctggagtaggactcg

SEQ ID NO: 1205 - DNA, 22 bp, Homo sapiens
gccgccgccgctggagtaggac

SEQ ID NO: 1206 - DNA, 38 bp, Homo sapiens
tcaccactacagcgcccaccgagccacccccactgcgc

SEQ ID NO: 1207 - DNA, 22 bp, Homo sapiens
cgcccaccgagccacccccact

SEQ ID NO: 1208 - DNA, 33 bp, Homo sapiens
ggccttgtccagccccgccgacgaggacgaggg

SEQ ID NO: 1209 - DNA, 22 bp, Homo sapiens
tccagccccgccgacgaggacg

SEQ ID NO: 1210 - DNA, 28 bp, Homo sapiens
gggtgcgagcgagggtatgggttggaca

SEQ ID NO: 1211 - DNA, 22 bp, Homo sapiens
gggtgcgagcgagggtatgggt

SEQ ID NO: 1212 - DNA, 41 bp, Homo sapiens
cactgcaggtcctggctggtcgtgatggcgttgatggtggg

SEQ ID NO: 1213 - DNA, 22 bp, Homo sapiens
tcctggctggtcgtgatggcgt

SEQ ID NO: 1214 - DNA, 32 bp, Homo sapiens
gggctcctcaccgtagaagcccccagcaatgc

SEQ ID NO: 1215 - DNA, 22 bp, Homo sapiens
ccgtagaagcccccagcaatgc

SEQ ID NO: 1216 - DNA, 29 bp, Homo sapiens
gctctgtcgctgccacccgctcatcttta

SEQ ID NO: 1217 - DNA, 22 bp, Homo sapiens
gctctgtcgctgccacccgctc

SEQ ID NO: 1218 - DNA, 38 bp, Homo sapiens
ccttttgtctactccaagccttccccctgcgtatgtgg

SEQ ID NO: 1219 - DNA, 22 bp, Homo sapiens
actccaagccttccccctgcgt

SEQ ID NO: 1220 - DNA, 22 bp, Homo sapiens
ggcgctcgatttcctgcttgag

SEQ ID NO: 1221 - DNA, 39 bp, Homo sapiens
cgagtcgcctctacttccctggtcaggcgctcgatttcc

SEQ ID NO: 1222 - DNA, 23 bp, Homo sapiens
ccctggtcaggcgctcgatttcc

SEQ ID NO: 1223 - DNA, 33 bp, Homo sapiens
tcaccattcggtcaatcagagctcggcgagtcg

SEQ ID NO: 1224 - DNA, 22 bp, Homo sapiens
tcggtcaatcagagctcggcga

SEQ ID NO: 1225 - DNA, 45 bp, Homo sapiens
gagtcaggttgagaggagcggaaaagggaggagccacgcgggagg

SEQ ID NO: 1226 - DNA, 22 bp, Homo sapiens
aagggaggagccacgcgggagg

SEQ ID NO: 1227 - DNA, 25 bp, Homo sapiens
aggagcggaaaagggaggagccacg

SEQ ID NO: 1228 - DNA, 42 bp, Homo sapiens
gttatcctgccaaccctcagccaaccaccttccgcctcattt

SEQ ID NO: 1229 - DNA, 23 bp, Homo sapiens
ccctcagccaaccaccttccgcc

SEQ ID NO: 1230 - DNA, 54 bp, Homo sapiens
gccacccctcccgccttgcttgctcgctcgctccccggacctcgcctcgccacg

SEQ ID NO: 1231 - DNA, 22 bp, Homo sapiens
ccccggacctcgcctcgccacg

SEQ ID NO: 1232 - DNA, 22 bp, Homo sapiens
tgcttgctcgctcgctccccgg

SEQ ID NO: 1233 - DNA, 23 bp, Homo sapiens
gccacccctcccgccttgcttgc

SEQ ID NO: 1234 - DNA, 39 bp, Homo sapiens
gcggcgtgcgggctgctcctgccacggctagcgcgcggg

SEQ ID NO: 1235 - DNA, 22 bp, Homo sapiens
cctgccacggctagcgcgcggg

SEQ ID NO: 1236 - DNA, 22 bp, Homo sapiens
gcggcgtgcgggctgctcctgc

SEQ ID NO: 1237 - DNA, 24 bp, Homo sapiens
ccgagggagcaagggcgggagttg

SEQ ID NO: 1238 - DNA, 23 bp, Homo sapiens
cgagggagcaagggcgggagttg

SEQ ID NO: 1239 - DNA, 30 bp, Homo sapiens
gggcgtcccgtgagaagtcccgagagtgcc

SEQ ID NO: 1240 - DNA, 22 bp, Homo sapiens
ggcgtcccgtgagaagtcccga

SEQ ID NO: 1241 - DNA, 23 bp, Homo sapiens
gccatcgccgcccccctcgtccg

SEQ ID NO: 1242 - DNA, 23 bp, Homo sapiens
gcccgctcgccccctcccttccg

SEQ ID NO: 1243 - DNA, 35 bp, Homo sapiens
catctctgtcgtcgtcctcgtccgccgccagcagg

SEQ ID NO: 1244 - DNA, 22 bp, Homo sapiens
tcgtcctcgtccgccgccagca

SEQ ID NO: 1245 - DNA, 34 bp, Homo sapiens
ggcagccaccctcctgacccccacctaccacaga

SEQ ID NO: 1246 - DNA, 22 bp, Homo sapiens
ggcagccaccctcctgaccccc

SEQ ID NO: 1247 - DNA, 30 bp, Homo sapiens
acagtcctaaagtgccccacccaagtcgac

SEQ ID NO: 1248 - DNA, 22 bp, Homo sapiens
aaagtgccccacccaagtcgac

SEQ ID NO: 1249 - DNA, 25 bp, Homo sapiens
cgggtcccgcgcgcactcttatccg

SEQ ID NO: 1250 - DNA, 22 bp, Homo sapiens
cgggtcccgcgcgcactcttat

SEQ ID NO: 1251 - DNA, 33 bp, Homo sapiens
cagccactggaggacaaagggccccgctctccg

SEQ ID NO: 1252 - DNA, 22 bp, Homo sapiens
ggacaaagggccccgctctccg

SEQ ID NO: 1253 - DNA, 31 bp, Homo sapiens
cctcgccacgggccgcacgacagtaattggg

SEQ ID NO: 1254 - DNA, 22 bp, Homo sapiens
cgccacgggccgcacgacacta

SEQ ID NO: 1255 - DNA, 34 bp, Homo sapiens
ccgcccgggctcctcctcctgtgccagccgccgc

SEQ ID NO: 1256 - DNA, 22 bp, Homo sapiens
ctcctcctgtgccagccgccgc

SEQ ID NO: 1257 - DNA, 23 bp, Homo sapiens
ccgcccgggctcctcctcctgtg

SEQ ID NO: 1258 - DNA, 26 bp, Homo sapiens
gcagctcaggccctggcgctctccgg

SEQ ID NO: 1259 - DNA, 22 bp, Homo sapiens
gctcaggccctggcgctctccg

SEQ ID NO: 1260 - DNA, 46 bp, Homo sapiens
gtgcaaactttttagcttcctcccctgcaagccttccacagcccgg

SEQ ID NO: 1261 - DNA, 22 bp, Homo sapiens
ctgcaagccttccacagcccgg

SEQ ID NO: 1262 - DNA, 26 bp, Homo sapiens
gctgccagccacgggagccgcacggg

SEQ ID NO: 1263 - DNA, 22 bp, Homo sapiens
gccagccacgggagccgcacgg

SEQ ID NO: 1264 - DNA, 44 bp, Homo sapiens
gctcccgcggccccgtcaccccccatgacccctgcacgcccaag

SEQ ID NO: 1265 - DNA, 22 bp, Homo sapiens
cccccatgacccctgcacgccc

SEQ ID NO: 1266 - DNA, 22 bp, Homo sapiens
gcggccccgtcaccccccatga

SEQ ID NO: 1267 - DNA, 27 bp, Homo sapiens
cccagccaaggcgacctcccgggctgg

SEQ ID NO: 1268 - DNA, 22 bp, Homo sapiens
ccaaggcgacctcccgggctgg

SEQ ID NO: 1269 - DNA, 39 bp, Homo sapiens
agacaggcagaaaagcgacaggaagtggcgcggccgggc

SEQ ID NO: 1270 - DNA, 22 bp, Homo sapiens
cgacaggaagtggcgcggccgg

SEQ ID NO: 1271 - DNA, 26 bp, Homo sapiens
ccagccggcccgggttgctgacgcgc

SEQ ID NO: 1272 - DNA, 23 bp, Homo sapiens
gccggcccgggttgctgacgcgc

SEQ ID NO: 1273 - DNA, 33 bp, Homo sapiens
agctcccgctgcctcccccgctcccacccccag

SEQ ID NO: 1274 - DNA, 22 bp, Homo sapiens
gctcccgctgcctcccccgctc

SEQ ID NO: 1275 - DNA, 61 bp, Homo sapiens
tgctagggtcaggagacacttctttgggtggcgtgggtgggaagccgaaaaggtgggagcc

SEQ ID NO: 1276 - DNA, 22 bp, Homo sapiens
ttgggtggcgtgggtgggaagc

SEQ ID NO: 1277 - DNA, 44 bp, Homo sapiens
tgacacctggtacttgacgccgtccttgtcctctcctcgggctg

SEQ ID NO: 1278 - DNA, 22 bp, Homo sapiens
cgccgtccttgtcctctcctcg

SEQ ID NO: 1279 - DNA, 24 bp, Homo sapiens
ggtgccgtcccgccgccagagagg

SEQ ID NO: 1280 - DNA, 22 bp, Homo sapiens
tgccgtcccgccgccagagagg

SEQ ID NO: 1281 - DNA, 46 bp, Homo sapiens
ggagtgggcaggatgtgtccggagtggctgaagggcgggaggtggc

SEQ ID NO: 1282 - DNA, 22 bp, Homo sapiens
tggctgaagggcgggaggtggc

SEQ ID NO: 1283 - DNA, 31 bp, Homo sapiens
gggtggatgggcgtcggagtgggcaggatgt

SEQ ID NO: 1284 - DNA, 22 bp, Homo sapiens
tggatgggcgtcggagtgggca

SEQ ID NO: 1285 - DNA, 49 bp, Homo sapiens
ccgggcaggcaggagtggtgtcggcttcgggaaatgctgggctgctaag

SEQ ID NO: 1286 - DNA, 22 bp, Homo sapiens
tcgggaaatgctgggctgctaa

SEQ ID NO: 1287 - DNA, 23 bp, Homo sapiens
ccgggcaggcaggagtggtgtcg

SEQ ID NO: 1288 - DNA, 42 bp, Homo sapiens
ggtgcaggctgaggtccccacaaatctgcccccagagccctg

SEQ ID NO: 1289 - DNA, 22 bp, Homo sapiens
ggtccccacaaatctgccccca

SEQ ID NO: 1290 - DNA, 48 bp, Homo sapiens
gccagggtagggatccatgaagcagaggcgggcggcacacctggctcc

SEQ ID NO: 1291 - DNA, 22 bp, Homo sapiens
ggcgggcggcacacctggctcc

SEQ ID NO: 1292 - DNA, 28 bp, Homo sapiens
gctttgccgccgtccagccagggtaggg

SEQ ID NO: 1293 - DNA, 22 bp, Homo sapiens
tttgccgccgtccagccagggt

SEQ ID NO: 1294 - DNA, 40 bp, Homo sapiens
gctggcgtggccccccgacaaggaggaggacgaggccggg

SEQ ID NO: 1295 - DNA, 22 bp, Homo sapiens
ccccccgacaaggaggaggacg

SEQ ID NO: 1296 - DNA, 39 bp, Homo sapiens
gggtgggcgggaaggtgaagaggtgcgggctggcgtggc

SEQ ID NO: 1297 - DNA, 22 bp, Homo sapiens
aagaggtgcgggctggcgtggc

SEQ ID NO: 1298 - DNA, 43 bp, Homo sapiens
cggagctgtactcgggcacgtagggcgggtaggtggtgatggg

SEQ ID NO: 1299 - DNA, 22 bp, Homo sapiens
agggcgggtaggtggtgatggg

SEQ ID NO: 1300 - DNA, 47 bp, Homo sapiens
ggttgccccacagttcacacactccctgccttctgtgctggaccggg

SEQ ID NO: 1301 - DNA, 22 bp, Homo sapiens
ccctgccttctgtgctggaccg

SEQ ID NO: 1302 - DNA, 43 bp, Homo sapiens
caggcgttgcacaggtagtgtcccgtgccatctcgccgccaca

SEQ ID NO: 1303 - DNA, 22 bp, Homo sapiens
gtcccgtgccatctcgccgcca

SEQ ID NO: 1304 - DNA, 37 bp, Homo sapiens
gcatgtggctggagtggctgaagggcgagatgtggct

SEQ ID NO: 1305 - DNA, 22 bp, Homo sapiens
tggctggagtggctgaagggcg

SEQ ID NO: 1306 - DNA, 44 bp, Homo sapiens
atggcgggtgcatcggcgtgggcgtggtcagcatgtggctggag

SEQ ID NO: 1307 - DNA, 22 bp, Homo sapiens
cgggtgcatcggcgtgggcgtg

SEQ ID NO: 1308 - DNA, 24 bp, Homo sapiens
gccgccgccgccgccagggacccg

SEQ ID NO: 1309 - DNA, 20 bp, Homo sapiens
cgccgccgccgccagggacc

SEQ ID NO: 1310 - DNA, 35 bp, Homo sapiens
gcccgcacccgccgctccgccgccactgctgtagg

SEQ ID NO: 1311 - DNA, 22 bp, Homo sapiens
gccgctccgccgccactgctgt

SEQ ID NO: 1312 - DNA, 46 bp, Homo sapiens
ccacaggcgttgcacagatagtgacccgtcccatctcgcctccaga

SEQ ID NO: 1313 - DNA, 22 bp, Homo sapiens
acccgtcccatctcgcctccag

SEQ ID NO: 1314 - DNA, 37 bp, Homo sapiens
catctcctcgctgctgctggtggtggcgttgctggag

SEQ ID NO: 1315 - DNA, 22 bp, Homo sapiens
tgctggtggtggcgttgctgga

SEQ ID NO: 1316 - DNA, 35 bp, Homo sapiens
tctgagaaaatccaacacccgcttcccctaaccag

SEQ ID NO: 1317 - DNA, 22 bp, Homo sapiens
ccaacacccgcttcccctaacc

SEQ ID NO: 1318 - DNA, 27 bp, Homo sapiens
cagtgtgctcgtgctgaagggtgggct

SEQ ID NO: 1319 - DNA, 22 bp, Homo sapiens
tgctcgtgctgaagggtgggct

SEQ ID NO: 1320 - DNA, 23 bp, Homo sapiens
catgcctcaagcggatggatggg

SEQ ID NO: 1321 - DNA, 22 bp, Homo sapiens
atgcctcaagcggatggatggg

SEQ ID NO: 1322 - DNA, 43 bp, Homo sapiens
tccttttatatttcctgcttcattcccccctttgatgcttttt

SEQ ID NO: 1323 - DNA, 22 bp, Homo sapiens
tcctgcttcattcccccctttg

SEQ ID NO: 1324 - DNA, 33 bp, Homo sapiens
ctcctggagccctccttcggagcccctgcctgg

SEQ ID NO: 1325 - DNA, 22 bp, Homo sapiens
gccctccttcggagcccctgcc

SEQ ID NO: 1326 - DNA, 25 bp, Homo sapiens
gggcaagtcgggtttttggcgcaaa

SEQ ID NO: 1327 - DNA, 22 bp, Homo sapiens
gggcaagtcgggtttttggcgc

SEQ ID NO: 1328 - DNA, 35 bp, Homo sapiens
ggattaacatccaaaggctgagcccggaacaaaga

SEQ ID NO: 1329 - DNA, 22 bp, Homo sapiens
tccaaaggctgagcccggaaca

SEQ ID NO: 1330 - DNA, 24 bp, Homo sapiens
ggccactggcccagcggattaaca

SEQ ID NO: 1331 - DNA, 22 bp, Homo sapiens
gccactggcccagcggattaac

SEQ ID NO: 1332 - DNA, 35 bp, Homo sapiens
gcttatatgttgtgggaaccaggaggccggagaga

SEQ ID NO: 1333 - DNA, 22 bp, Homo sapiens
ttgtgggaaccaggaggccgga

SEQ ID NO: 1334 - DNA, 25 bp, Homo sapiens
gggagccagggagacgggagccgga

SEQ ID NO: 1335 - DNA, 22 bp, Homo sapiens
gggagccagggagacgggagcc

SEQ ID NO: 1336 - DNA, 30 bp, Homo sapiens
cctagcgccaccgagggaggaggcgagggc

SEQ ID NO: 1337 - DNA, 22 bp, Homo sapiens
caccgagggaggaggcgagggc

SEQ ID NO: 1338 - DNA, 41 bp, Homo sapiens
cgatccgctttcgcttctccgcccgcactgaggaagagagg

SEQ ID NO: 1339 - DNA, 22 bp, Homo sapiens
ccgctttcgcttctccgcccgc

SEQ ID NO: 1340 - DNA, 22 bp, Homo sapiens
cgcccgcactgaggaagagagg

SEQ ID NO: 1341 - DNA, 38 bp, Homo sapiens
tctgcgatgcagaaggagggctttttgacggcggcggg

SEQ ID NO: 1342 - DNA, 22 bp, Homo sapiens
agggctttttgacggcggcggg

SEQ ID NO: 1343 - DNA, 23 bp, Homo sapiens
cgcggtgagggcggcggcgaggc

SEQ ID NO: 1344 - DNA, 22 bp, Homo sapiens
gcggtgagggcggcggcgaggc

SEQ ID NO: 1345 - DNA, 27 bp, Homo sapiens
cgcttggaaagaggcgtgcgggtgaac

SEQ ID NO: 1346 - DNA, 22 bp, Homo sapiens
tggaaagaggcgtgcgggtgaa

SEQ ID NO: 1347 - DNA, 42 bp, Homo sapiens
ctgctgttgttgttgcgggtgatggtggtggtaggcggctga

SEQ ID NO: 1348 - DNA, 22 bp, Homo sapiens
cgggtgatggtggtggtaggcg

SEQ ID NO: 1349 - DNA, 48 bp, Homo sapiens
gggcggaggcggaggctgttctctgcgcggctgttgctgctgctgttg

SEQ ID NO: 1350 - DNA, 22 bp, Homo sapiens
gcggctgttgctgctgctgttg

SEQ ID NO: 1351 - DNA, 22 bp, Homo sapiens
gggcggaggcggaggctgttct

SEQ ID NO: 1352 - DNA, 29 bp, Homo sapiens
gggctcctctcgtcctgctcgccatccgc

SEQ ID NO: 1353 - DNA, 22 bp, Homo sapiens
tctcgtcctgctcgccatccgc

SEQ ID NO: 1354 - DNA, 49 bp, Homo sapiens
tttggtgcagagaacgctcactcccctcagtccgctccgtgtcgctggg

SEQ ID NO: 1355 - DNA, 22 bp, Homo sapiens
ccctcagtccgctccgtgtcgc

SEQ ID NO: 1356 - DNA, 27 bp, Homo sapiens
ccagcactgctggcggtaatgagggcg

SEQ ID NO: 1357 - DNA, 22 bp, Homo sapiens
actgctggcggtaatgagggcg

SEQ ID NO: 1358 - DNA, 49 bp, Homo sapiens
gctgaagctgaaactattgccgccgccgccgctgctcccaccactccca

SEQ ID NO: 1359 - DNA, 24 bp, Homo sapiens
aaactattgccgccgccgccgctg

SEQ ID NO: 1360 - DNA, 28 bp, Homo sapiens
agcgctgctggctgtgggctgtgttgca

SEQ ID NO: 1361 - DNA, 22 bp, Homo sapiens
cgctgctggctgtgggctgtgt

SEQ ID NO: 1362 - DNA, 46 bp, Homo sapiens
ggaggtaggctccacgctgcgtctcctgccctaccaagtcgccaac

SEQ ID NO: 1363 - DNA, 22 bp, Homo sapiens
tcctgccctaccaagtcgccaa

SEQ ID NO: 1364 - DNA, 26 bp, Homo sapiens
gcgccaggcgccccccactttttttt

SEQ ID NO: 1365 - DNA, 22 bp, Homo sapiens
cgccaggcgccccccacttttt

SEQ ID NO: 1366 - DNA, 33 bp, Homo sapiens
gggtcgggaagtcaagcggcatcaacaccaggc

SEQ ID NO: 1367 - DNA, 22 bp, Homo sapiens
tcaagcggcatcaacaccaggc

SEQ ID NO: 1368 - DNA, 22 bp, Homo sapiens
gggtcgggaagtcaagcggcat

SEQ ID NO: 1369 - DNA, 31 bp, Homo sapiens
aggtctcacccctcccccacacgcacacttc

SEQ ID NO: 1370 - DNA, 22 bp, Homo sapiens
tcacccctcccccacacgcaca

SEQ ID NO: 1371 - DNA, 35 bp, Homo sapiens
tgggaaggccccgcattttcaggtgtgtgtgcggg

SEQ ID NO: 1372 - DNA, 22 bp, Homo sapiens
gccccgcattttcaggtgtgtg

SEQ ID NO: 1373 - DNA, 24 bp, Homo sapiens
tggtgtttcccaacgcctccctgc

SEQ ID NO: 1374 - DNA, 22 bp, Homo sapiens
gtgtttcccaagccctccctgc

SEQ ID NO: 1375 - DNA, 22 bp, Homo sapiens
cggacggcgggcactggcaacc

SEQ ID NO: 1376 - DNA, 23 bp, Homo sapiens
ggcctctgcccgccctcccctgg

SEQ ID NO: 1377 - DNA, 22 bp, Homo sapiens
gcctctgcccgccctcccctgg

SEQ ID NO: 1378 - DNA, 37 bp, Homo sapiens
tttgccaataatcaaagtcgccgccggaaactcagcc

SEQ ID NO: 1379 - DNA, 22 bp, Homo sapiens
ccaataatcaaagtcgccgccg

SEQ ID NO: 1380 - DNA, 23 bp, Homo sapiens
cgcggagtcagtgcgtgcggtgc

SEQ ID NO: 1381 - DNA, 22 bp, Homo sapiens
gcggagtcagtgcgtgcggtgc

SEQ ID NO: 1382 - DNA, 43 bp, Homo sapiens
ggccgtcgatgccgctagtcccgccgctcgccccgccgccgcc

SEQ ID NO: 1383 - DNA, 22 bp, Homo sapiens
agtcccgccgctcgccccgccg

SEQ ID NO: 1384 - DNA, 27 bp, Homo sapiens
ggccccccgtgcccgccgcccgtgccg

SEQ ID NO: 1385 - DNA, 22 bp, Homo sapiens
cccgtgcccgccgcccgtgccg

SEQ ID NO: 1386 - DNA, 40 bp, Homo sapiens
gatctcagtctcacacctccaactgccccttcccgttaag

SEQ ID NO: 1387 - DNA, 22 bp, Homo sapiens
cacctccaactgccccttcccg

SEQ ID NO: 1388 - DNA, 44 bp, Homo sapiens
ccaagttcctttccccggtgataagccctgacccccattcccgg

SEQ ID NO: 1389 - DNA, 22 bp, Homo sapiens
taagccctgacccccattcccg

SEQ ID NO: 1390 - DNA, 35 bp, Homo sapiens
ggcccacgccccctgctttagtcaaacaaggcccc

SEQ ID NO: 1391 - DNA, 22 bp, Homo sapiens
tgctttagtcaaacaaggcccc

SEQ ID NO: 1392 - DNA, 22 bp, Homo sapiens
gcccacgccccctgctttagtc

SEQ ID NO: 1393 - DNA, 33 bp, Homo sapiens
aagggagagagggaaagagggagggaggaagga

SEQ ID NO: 1394 - DNA, 22 bp, Homo sapiens
gggaaagagggagggaggaagg

SEQ ID NO: 1395 - DNA, 31 bp, Homo sapiens
actccccaaggaatgcggactcaggaccacc

SEQ ID NO: 1396 - DNA, 22 bp, Homo sapiens
ccccaaggaatgcggactcagg

SEQ ID NO: 1397 - DNA, 41 bp, Homo sapiens
ggctccggtcctcgccccagcccctcccgttgctgcttgta

SEQ ID NO: 1398 - DNA, 22 bp, Homo sapiens
tcgccccagcccctcccgttgc

SEQ ID NO: 1399 - DNA, 22 bp, Homo sapiens
gcccctcccgttgctgcttgta

SEQ ID NO: 1400 - DNA, 30 bp, Homo sapiens
agctgctggctggtgaaggcggtgcgcggc

SEQ ID NO: 1401 - DNA, 22 bp, Homo sapiens
gctggctggtgaaggcggtgcg

SEQ ID NO: 1402 - DNA, 31 bp, Homo sapiens
gcagcgctagatgcctcagaccgcccgtggg

SEQ ID NO: 1403 - DNA, 22 bp, Homo sapiens
agatgcctcagaccgcccgtgg

SEQ ID NO: 1404 - DNA, 32 bp, Homo sapiens
ccgtctgcggaggaagggtcagggcagctggc

SEQ ID NO: 1405 - DNA, 22 bp, Homo sapiens
gcggaggaagggtcagggcagc

SEQ ID NO: 1406 - DNA, 48 bp, Homo sapiens
ctcgtagcttcctcctccccgcaaccccccactcagcagcaaacccca

SEQ ID NO: 1407 - DNA, 22 bp, Homo sapiens
ccgcaaccccccactcagcagc

SEQ ID NO: 1408 - DNA, 41 bp, Homo sapiens
ggttctggaaccaaatcttcacctgcgggcacaagcgggcg

SEQ ID NO: 1409 - DNA, 22 bp, Homo sapiens
aaccaaatcttcacctgcgggc

SEQ ID NO: 1410 - DNA, 35 bp, Homo sapiens
gcgcccccgccgccgcccttctgtttctccgcttc

SEQ ID NO: 1411 - DNA, 22 bp, Homo sapiens
ccgccgccgcccttctgtttct

SEQ ID NO: 1412 - DNA, 40 bp, Homo sapiens
ggaaatggtcctcgtcgtcctcgtcctcgtcctcctcggg

SEQ ID NO: 1413 - DNA, 22 bp, Homo sapiens
cctcgtcctcgtcctcctcggg

SEQ ID NO: 1414 - DNA, 31 bp, Homo sapiens
cgaggagcagtcggaggaggcggcgtggacg

SEQ ID NO: 1415 - DNA, 22 bp, Homo sapiens
gcagtcggaggaggcggcgtgg

SEQ ID NO: 1416 - DNA, 31 bp, Homo sapiens
cgcactcgcgcctcccccaacaccaaccaaa

SEQ ID NO: 1417 - DNA, 22 bp, Homo sapiens
cgcctcccccaacaccaaccaa

SEQ ID NO: 1418 - DNA, 40 bp, Homo sapiens
tttgaacgctcgtgacataatccccccgaccccagagacg

SEQ ID NO: 1419 - DNA, 22 bp, Homo sapiens
aatccccccgaccccagagacg

SEQ ID NO: 1420 - DNA, 42 bp, Homo sapiens
tccgattttcaccctcagctgccaaccgccgagtagacaccc

SEQ ID NO: 1421 - DNA, 22 bp, Homo sapiens
caccctcagctgccaaccgccg

SEQ ID NO: 1422 - DNA, 22 bp, Homo sapiens
gccaaccgccgagtagacaccc

SEQ ID NO: 1423 - DNA, 27 bp, Homo sapiens
ggattctcccgcctcagcctcccgagt

SEQ ID NO: 1424 - DNA, 22 bp, Homo sapiens
ttctcccgcctcagcctcccga

SEQ ID NO: 1425 - DNA, 34 bp, Homo sapiens
gacagttttgctcgtcggtcgcccaggctggagg

SEQ ID NO: 1426 - DNA, 22 bp, Homo sapiens
tgctcgtcggtcgcccaggctg

SEQ ID NO: 1427 - DNA, 35 bp, Homo sapiens
ggaagtccttgcatcctcctacccccagccctgga

SEQ ID NO: 1428 - DNA, 23 bp, Homo sapiens
ttgcatcctcctacccccagccc

SEQ ID NO: 1429 - DNA, 34 bp, Homo sapiens
gggtttggcataggaggctggtgggcgacggcag

SEQ ID NO: 1430 - DNA, 22 bp, Homo sapiens
aggaggctggtgggcgacggca

SEQ ID NO: 1431 - DNA, 35 bp, Homo sapiens
cccaggcaaccaggcggcagcggtccaggttaccc

SEQ ID NO: 1432 - DNA, 23 bp, Homo sapiens
ggcggcagcggtccaggttaccc

SEQ ID NO: 1433 - DNA, 22 bp, Homo sapiens
cccaggcaaccaggcggcagcg

SEQ ID NO: 1434 - DNA, 33 bp, Homo sapiens
agggtcccgcctcatccgcccccgccctacccg

SEQ ID NO: 1435 - DNA, 22 bp, Homo sapiens
tcatccgcccccgccctacccg

SEQ ID NO: 1436 - DNA, 22 bp, Homo sapiens
cccgcctcatccgcccccgccc

SEQ ID NO: 1437 - DNA, 22 bp, Homo sapiens
cccaggctcacaggctccccgc

SEQ ID NO: 1438 - DNA, 36 bp, Homo sapiens
ctgcacgtccgcccccgccccgccccgctccgcccg

SEQ ID NO: 1439 - DNA, 24 bp, Homo sapiens
tactgcacgtccgcccccgccccg

SEQ ID NO: 1440 - DNA, 44 bp, Homo sapiens
gcatggagcgacggcacccaccagcacaccgccggcgcccccag

SEQ ID NO: 1441 - DNA, 22 bp, Homo sapiens
cagcacaccgccggcgccccca

SEQ ID NO: 1442 - DNA, 22 bp, Homo sapiens
gcacccaccagcacaccgccgg

SEQ ID NO: 1443 - DNA, 22 bp, Homo sapiens
ggagcgacggcacccaccagca

SEQ ID NO: 1444 - DNA, 29 bp, Homo sapiens
gcgcccccgcaccgttcacctcgcacttc

SEQ ID NO: 1445 - DNA, 22 bp, Homo sapiens
cgcccccgcaccgttcacctcg

SEQ ID NO: 1446 - DNA, 39 bp, Homo sapiens
cgatgtcaatggtctggaagcggcggctgtacctgcgta

SEQ ID NO: 1447 - DNA, 22 bp, Homo sapiens
ggaagcggcggctgtacctgcg

SEQ ID NO: 1448 - DNA, 22 bp, Homo sapiens
tcaatggtctggaagcggcggc

SEQ ID NO: 1449 - DNA, 37 bp, Homo sapiens
tcatagatgaaaacccccccgagacagcagcactgca

SEQ ID NO: 1450 - DNA, 23 bp, Homo sapiens
ccccccgagacagcagcactgca

SEQ ID NO: 1451 - DNA, 45 bp, Homo sapiens
ctccctcctccctgtctccaaagcggcaccgccctcgtgcggttt

SEQ ID NO: 1452 - DNA, 23 bp, Homo sapiens
tccaaagcggcaccgccctcgtg

SEQ ID NO: 1453 - DNA, 24 bp, Homo sapiens
cctgtctccaaagcggcaccgccc

SEQ ID NO: 1454 - DNA, 40 bp, Homo sapiens
ctccttttaactggccggcgggtcacgtggcacaggcagt

SEQ ID NO: 1455 - DNA, 22 bp, Homo sapiens
cggcgggtcacgtggcacaggc

SEQ ID NO: 1456 - DNA, 22 bp, Homo sapiens
aactggccggcgggtcacgtgg

SEQ ID NO: 1457 - DNA, 34 bp, Homo sapiens
ggcgcaattgtccaagaagccagcggagcgcccc

SEQ ID NO: 1458 - DNA, 22 bp, Homo sapiens
ccaagaagccagcggagcgccc

SEQ ID NO: 1459 - DNA, 49 bp, Homo sapiens
gcatacaccgactgggccgccgccgccgccgctagccgagcagcacaca

SEQ ID NO: 1460 - DNA, 22 bp, Homo sapiens
cgccgccgctagccgagcagca

SEQ ID NO: 1461 - DNA, 22 bp, Homo sapiens
atacaccgactgggccgccgcc

SEQ ID NO: 1462 - DNA, 40 bp, Homo sapiens
cgataagtagtaccttgccccgcagggagcccaggctcac

SEQ ID NO: 1463 - DNA, 22 bp, Homo sapiens
ttgccccgcagggagcccaggc

SEQ ID NO: 1464 - DNA, 24 bp, Homo sapiens
gggtccgaggcgccgctgcagctc

SEQ ID NO: 1465 - DNA, 23 bp, Homo sapiens
ggtccgaggcgccgctgcagctc

SEQ ID NO: 1466 - DNA, 38 bp, Homo sapiens
ccagcactttgggaggccgaggcgggtggatcacgagg

SEQ ID NO: 1467 - DNA, 22 bp, Homo sapiens
ttgggaggccgaggcgggtgga

SEQ ID NO: 1468 - DNA, 24 bp, Homo sapiens
ggccgaggcgggtggatcacgagg

SEQ ID NO: 1469 - DNA, 32 bp, Homo sapiens
acctgcgccgcgccacaccgggagacaagaag

SEQ ID NO: 1470 - DNA, 22 bp, Homo sapiens
cgcgccacaccgggagacaaga

SEQ ID NO: 1471 - DNA, 22 bp, Homo sapiens
tcacctgcgccgcgccacaccg

SEQ ID NO: 1472 - DNA, 34 bp, Homo sapiens
ggcccttgcccaaatgttgccgccctgagtcccg

SEQ ID NO: 1473 - DNA, 22 bp, Homo sapiens
aatgttgccgccctgagtcccg

SEQ ID NO: 1474 - DNA, 22 bp, Homo sapiens
gcccttgcccaaatgttgccgc

SEQ ID NO: 1475 - DNA, 29 bp, Homo sapiens
gggagccagggagacgggagccggacacc

SEQ ID NO: 1476 - DNA, 22 bp, Homo sapiens
ggagccagggagacgggagccg

SEQ ID NO: 1477 - DNA, 36 bp, Homo sapiens
cctagcgccaccgagggaggaggcgagggccggatc

SEQ ID NO: 1478 - DNA, 22 bp, Homo sapiens
cgagggaggaggcgagggccgg

SEQ ID NO: 1479 - DNA, 23 bp, Homo sapiens
ccaccgagggaggaggcgagggc

SEQ ID NO: 1480 - DNA, 23 bp, Homo sapiens
cctagcgccaccgagggaggagg

SEQ ID NO: 1481 - DNA, 30 bp, Homo sapiens
gatccgctttcgcttctccgcccgcactga

SEQ ID NO: 1482 - DNA, 22 bp, Homo sapiens
ccgctttcgcttctccgcccgc

SEQ ID NO: 1483 - DNA, 33 bp, Homo sapiens
gatgcagaaggagggctttttgacggcggcggg

SEQ ID NO: 1484 - DNA, 22 bp, Homo sapiens
ggagggctttttgacggcggcg

SEQ ID NO: 1485 - DNA, 39 bp, Homo sapiens
ttgcgggtgatggtggtggtaggcggctgggagcggaga

SEQ ID NO: 1486 - DNA, 22 bp, Homo sapiens
ggtggtaggcggctgggagcgg

SEQ ID NO: 1487 - DNA, 23 bp, Homo sapiens
gggtgatggtggtggtaggcggc

SEQ ID NO: 1488 - DNA, 42 bp, Homo sapiens
gggcggaggcggaggctgttgctgctgcggctgttgctgctg

SEQ ID NO: 1489 - DNA, 22 bp, Homo sapiens
ttgctgctgcggctgttgctgc

SEQ ID NO: 1490 - DNA, 22 bp, Homo sapiens
cggaggctgttgctgctgcggc

SEQ ID NO: 1491 - DNA, 22 bp, Homo sapiens
gggcggaggcggaggctgttgc

SEQ ID NO: 1492 - DNA, 30 bp, Homo sapiens
gcctgcagcctcccgcccaagacctacctc

SEQ ID NO: 1493 - DNA, 23 bp, Homo sapiens
gcctcccgcccaagacctacctc

SEQ ID NO: 1494 - DNA, 22 bp, Homo sapiens
gcctgcagcctcccgcccaaga

SEQ ID NO: 1495 - DNA, 40 bp, Homo sapiens
aggaaatgttagcctcacccctccaccacatctccggatc

SEQ ID NO: 1496 - DNA, 23 bp, Homo sapiens
cccctccaccacatctaaggatc

SEQ ID NO: 1497 - DNA, 30 bp, Homo sapiens
gctacaaaacaggctgcctcccgaaacccg

SEQ ID NO: 1498 - DNA, 22 bp, Homo sapiens
acaggctgcctcccgaaacccg

SEQ ID NO: 1499 - DNA, 43 bp, Homo sapiens
ggcccaactcagcaccgcgtccgcctcgtgcctcccaggagat

SEQ ID NO: 1500 - DNA, 22 bp, Homo sapiens
ccgcgtccgcctcgtgcctccc

SEQ ID NO: 1501 - DNA, 23 bp, Homo sapiens
gcccaactcagcaccgcgtccgc

SEQ ID NO: 1502 - DNA, 32 bp, Homo sapiens
cggagcgcgctttggcccctttgctccccttc

SEQ ID NO: 1503 - DNA, 22 bp, Homo sapiens
cggagcgcgctttggccccttt

SEQ ID NO: 1504 - DNA, 22 bp, Homo sapiens
gctctgcaaagcccgcctcccg

SEQ ID NO: 1505 - DNA, 43 bp, Homo sapiens
ccacgccccggccacgccaaagtttttgctgcggccgcgtggg

SEQ ID NO: 1506 - DNA, 22 bp, Homo sapiens
gtttttgctgcggccgcgtggg

SEQ ID NO: 1507 - DNA, 22 bp, Homo sapiens
ccacgccccggccacgccaaag

SEQ ID NO: 1508 - DNA, 29 bp, Homo sapiens
gggagccagggagacgggagccggacacc

SEQ ID NO: 1509 - DNA, 22 bp, Homo sapiens
agccagggagacgggagccgga

SEQ ID NO: 1510 - DNA, 22 bp, Homo sapiens
gcgggctggaggagagcgaggg

SEQ ID NO: 1511 - DNA, 36 bp, Homo sapiens
gccggtcaccgcctcgctccctggcctcgctttaaa

SEQ ID NO: 1512 - DNA, 22 bp, Homo sapiens
cctcgctccctggcctcgcttt

SEQ ID NO: 1513 - DNA, 22 bp, Homo sapiens
gccggtcaccgcctcgctccct

SEQ ID NO: 1514 - DNA, 27 bp, Homo sapiens
ggcggcagccgaggacgatccgctttc

SEQ ID NO: 1515 - DNA, 22 bp, Homo sapiens
ggcagccgaggacgatccgctt

SEQ ID NO: 1516 - DNA, 21 bp, Homo sapiens
ggcggcagccgaggacgatcc

SEQ ID NO: 1517 - DNA, 23 bp, Homo sapiens
ggcgcgcgagtcccggagaaggc

SEQ ID NO: 1518 - DNA, 22 bp, Homo sapiens
ggcgcgcgagtcccggagaagg

SEQ ID NO: 1519 - DNA, 24 bp, Homo sapiens
ccagcccggctgcgaacatcctgc

SEQ ID NO: 1520 - DNA, 22 bp, Homo sapiens
agcccggctgcgaacatcctgc

SEQ ID NO: 1521 - DNA, 24 bp, Homo sapiens
gcttggaaagaggcgtgcgggtga

SEQ ID NO: 1522 - DNA, 22 bp, Homo sapiens
ttggaaagaggcgtgcgggtga

SEQ ID NO: 1523 - DNA, 28 bp, Homo sapiens
cgggacttcggagggcgccaccactggg

SEQ ID NO: 1524 - DNA, 22 bp, Homo sapiens
ttcggagggcgccaccactggg

SEQ ID NO: 1525 - DNA, 22 bp, Homo sapiens
cgggacttcggagggcgccacc

SEQ ID NO: 1526 - DNA, 39 bp, Homo sapiens
ctccgctgatttgttcctccccttccccttgccctggat

SEQ ID NO: 1527 - DNA, 22 bp, Homo sapiens
cctccccttccccttgccctgg

SEQ ID NO: 1528 - DNA, 28 bp, Homo sapiens
gcctgagaggtgcaccccggcgggccgc

SEQ ID NO: 1529 - DNA, 22 bp, Homo sapiens
gagaggtgcaccccggcgggcc

SEQ ID NO: 1530 - DNA, 37 bp, Homo sapiens
tgggatctagagatgcgaagaactggccggccgaggg

SEQ ID NO: 1531 - DNA, 22 bp, Homo sapiens
cgaagaactggccggccgaggg

SEQ ID NO: 1532 - DNA, 23 bp, Homo sapiens
cgcagaacgggagccagagggaa

SEQ ID NO: 1533 - DNA, 22 bp, Homo sapiens
cgcagaacgggagccagaggga

SEQ ID NO: 1534 - DNA, 36 bp, Homo sapiens
gcccagcatcgccgccagctgctttcggtccggctt

SEQ ID NO: 1535 - DNA, 22 bp, Homo sapiens
cgccagctgctttcggtccggc

SEQ ID NO: 1536 - DNA, 22 bp, Homo sapiens
gcatcgccgccagctgctttcg

SEQ ID NO: 1537 - DNA, 20 bp, Homo sapiens
gcccagcatcgccgccagct

SEQ ID NO: 1538 - DNA, 26 bp, Homo sapiens
ccgcccgagggcctgtgcgctggagc

SEQ ID NO: 1539 - DNA, 22 bp, Homo sapiens
ccgagggcctgtgcgctggagc

SEQ ID NO: 1540 - DNA, 35 bp, Homo sapiens
tggccttaacaacccccagcaaagccaagcgcctt

SEQ ID NO: 1541 - DNA, 22 bp, Homo sapiens
cccccagcaaagccaagcgcct

SEQ ID NO: 1542 - DNA, 31 bp, Homo sapiens
gggccaggagacgcaccccgacaccttggcc

SEQ ID NO: 1543 - DNA, 22 bp, Homo sapiens
ggccaggagacgcaccccgaca

SEQ ID NO: 1544 - DNA, 22 bp, Homo sapiens
gacgcaccccgacaccttggcc

SEQ ID NO: 1545 - DNA, 34 bp, Homo sapiens
gcgccccgagccaatcccgagccagagtttccgc

SEQ ID NO: 1546 - DNA, 22 bp, Homo sapiens
cgccccgagccaatcccgagcc

SEQ ID NO: 1547 - DNA, 37 bp, Homo sapiens
gcgccaccaccaccgccgcctgcctcgcctctgcccg

SEQ ID NO: 1548 - DNA, 22 bp, Homo sapiens
accgccgcctgcctcgcctctg

SEQ ID NO: 1549 - DNA, 30 bp, Homo sapiens
gggaccccaagacagcaaacccagcccagt

SEQ ID NO: 1550 - DNA, 22 bp, Homo sapiens
cccaagacagcaaacccagccc

SEQ ID NO: 1551 - DNA, 27 bp, Homo sapiens
ggagttccagccccgagccgagagacg

SEQ ID NO: 1552 - DNA, 22 bp, Homo sapiens
tccagccccgagccgagagacg

SEQ ID NO: 1553 - DNA, 32 bp, Homo sapiens
aagtgtaggcgcctccgaccaagcagccaagg

SEQ ID NO: 1554 - DNA, 22 bp, Homo sapiens
cgcctccgaccaagcagccaag

SEQ ID NO: 1555 - DNA, 30 bp, Homo sapiens
gcccggcatggcaggcacagagggcacggt

SEQ ID NO: 1556 - DNA, 22 bp, Homo sapiens
tggcaggcacagagggcacggt

SEQ ID NO: 1557 - DNA, 36 bp, Homo sapiens
gcaccgccgctgctgccgccgccgccgccaggaccg

SEQ ID NO: 1558 - DNA, 20 bp, Homo sapiens
tgccgccgccgccgccagga

SEQ ID NO: 1559 - DNA, 22 bp, Homo sapiens
caccgccgctgctgccgccgcc

SEQ ID NO: 1560 - DNA, 33 bp, Homo sapiens
ccgcagtctgccgtctccactttgtccgccggt

SEQ ID NO: 1561 - DNA, 22 bp, Homo sapiens
gccgtctccactttgtccgccg

SEQ ID NO: 1562 - DNA, 24 bp, Homo sapiens
cggcctcccgttcctccgcagtct

SEQ ID NO: 1563 - DNA, 22 bp, Homo sapiens
gcctcccgttcctccgcagtct

SEQ ID NO: 1564 - DNA, 33 bp, Homo sapiens
gcaggaggatgcggttcgcttgctgcctctcgg

SEQ ID NO: 1565 - DNA, 21 bp, Homo sapiens
ggttcgcttgctgcctctcgg

SEQ ID NO: 1566 - DNA, 32 bp, Homo sapiens
gcagattctgcagggcgaagagcgacgagttg

SEQ ID NO: 1567 - DNA, 22 bp, Homo sapiens
tgcagggcgaagagcgacgagt

SEQ ID NO: 1568 - DNA, 34 bp, Homo sapiens
ccacagggcagaatgggcaggctcactcgcaggc

SEQ ID NO: 1569 - DNA, 22 bp, Homo sapiens
atgggcaggctcactcgcaggc

SEQ ID NO: 1570 - DNA, 26 bp, Homo sapiens
gccacggcggagcagggcagcggatc

SEQ ID NO: 1571 - DNA, 22 bp, Homo sapiens
ccacggcggagcagggcagcgg

SEQ ID NO: 1572 - DNA, 33 bp, Homo sapiens
ggccgaggcgccgctggagttgcttagggagtt

SEQ ID NO: 1573 - DNA, 22 bp, Homo sapiens
gcgccgctggagttgcttaggg

SEQ ID NO: 1574 - DNA, 23 bp, Homo sapiens
gggagttgggtggaggcgatggg

SEQ ID NO: 1575 - DNA, 35 bp, Homo sapiens
ggctccggacgccgtgccaaccccctctctgctgc

SEQ ID NO: 1576 - DNA, 22 bp, Homo sapiens
cgccgtgccaaccccctctctg

SEQ ID NO: 1577 - DNA, 34 bp, Homo sapiens
cctcataaattatccgccgtgacaagcccgattc

SEQ ID NO: 1578 - DNA, 22 bp, Homo sapiens
tccgccgtgacaagcccgattc

SEQ ID NO: 1579 - DNA, 52 bp, Homo sapiens
gtcaccctccctcaaagttccagccccgagagccgcctcccgtttccagcct

SEQ ID NO: 1580 - DNA, 22 bp, Homo sapiens
agccgcctcccgtttccagcct

SEQ ID NO: 1581 - DNA, 22 bp, Homo sapiens
gttccagccccgagagccgcct

SEQ ID NO: 1582 - DNA, 24 bp, Homo sapiens
ccctccctcaaagttccagccccg

SEQ ID NO: 1583 - DNA, 25 bp, Homo sapiens
tgcccaccgcacagaaacccaggaa

SEQ ID NO: 1584 - DNA, 22 bp, Homo sapiens
gcccaccgcacagaaacccagg

SEQ ID NO: 1585 - DNA, 36 bp, Homo sapiens
tcctataaaggcacgcagggacacaccgcttggagt

SEQ ID NO: 1586 - DNA, 22 bp, Homo sapiens
ggcacgcagggacacaccgctt

SEQ ID NO: 1587 - DNA, 36 bp, Homo sapiens
cactcccctctccccaaagaccgtgccccagaaggt

SEQ ID NO: 1588 - DNA, 22 bp, Homo sapiens
tccccaaagaccgtgccccaga

SEQ ID NO: 1589 - DNA, 29 bp, Homo sapiens
cggtccgcggcgcgtagtaggaggcaggg

SEQ ID NO: 1590 - DNA, 23 bp, Homo sapiens
gcggcgcgtagtaggaggcaggg

SEQ ID NO: 1591 - DNA, 26 bp, Homo sapiens
gggtacagcgcggcagcagggtaggc

SEQ ID NO: 1592 - DNA, 22 bp, Homo sapiens
gggtacagcgcggcagcagggt

SEQ ID NO: 1593 - DNA, 34 bp, Homo sapiens
acaaacagagcgtgtgggcgatctcgatgcggcg

SEQ ID NO: 1594 - DNA, 22 bp, Homo sapiens
tgtgggcgatctcgatgcggcg

SEQ ID NO: 1595 - DNA, 39 bp, Homo sapiens
agaagattatatggaggagggaacgggtgtggaggtgct

SEQ ID NO: 1596 - DNA, 22 bp, Homo sapiens
tggaggagggaacgggtgtgga

SEQ ID NO: 1597 - DNA, 27 bp, Homo sapiens
gcgagctctcgcccaccgccccaaagt

SEQ ID NO: 1598 - DNA, 22 bp, Homo sapiens
gctctcgcccaccgccccaaag

SEQ ID NO: 1599 - DNA, 33 bp, Homo sapiens
cctctgggcgggctcaaggctggaaggcgctgc

SEQ ID NO: 1600 - DNA, 22 bp, Homo sapiens
gcgggctcaaggctggaaggcg

SEQ ID NO: 1601 - DNA, 35 bp, Homo sapiens
tcgtaacacaaggcgaggcaggcttgtgggaaccg

SEQ ID NO: 1602 - DNA, 22 bp, Homo sapiens
cgaggcaggcttgtgggaaccg

SEQ ID NO: 1603 - DNA, 23 bp, Homo sapiens
cgtaacacaaggcgaggcaggct

SEQ ID NO: 1604 - DNA, 33 bp, Homo sapiens
ggccatttggataacgccccgagaaggagttta

SEQ ID NO: 1605 - DNA, 25 bp, Homo sapiens
ccatttggataacgccccgagaagg

SEQ ID NO: 1606 - DNA, 30 bp, Homo sapiens
ggcactaccccacctcaactgctgcccctt

SEQ ID NO: 1607 - DNA, 22 bp, Homo sapiens
ccccacctcaactgctgcccct

SEQ ID NO: 1608 - DNA, 56 bp, Homo sapiens
ttccctccctttccatccatcttgttcccaccccccgtcatccccccaacccaatg

SEQ ID NO: 1609 - DNA, 22 bp, Homo sapiens
cccgtcatccccccaacccaat

SEQ ID NO: 1610 - DNA, 33 bp, Homo sapiens
cggctcccttcccccgtttcgcactcctccagc

SEQ ID NO: 1611 - DNA, 22 bp, Homo sapiens
ggctcccttcccccgtttcgca

SEQ ID NO: 1612 - DNA, 39 bp, Homo sapiens
gcctttccctcggcgtcctccctccctttccagcacctt

SEQ ID NO: 1613 - DNA, 22 bp, Homo sapiens
ttccctcggcgtcctccctccc

SEQ ID NO: 1614 - DNA, 30 bp, Homo sapiens
ctcccccacccgagagccttccttcccggg

SEQ ID NO: 1615 - DNA, 22 bp, Homo sapiens
tcccccacccgagagccttcct

SEQ ID NO: 1616 - DNA, 31 bp, Homo sapiens
ggtctggcggcctcgtttgcggtcagttcct

SEQ ID NO: 1617 - DNA, 22 bp, Homo sapiens
gcctcgtttgcggtcagttcct

SEQ ID NO: 1618 - DNA, 33 bp, Homo sapiens
cagggtctggtagcgggtgtaggtctggcggcc

SEQ ID NO: 1619 - DNA, 22 bp, Homo sapiens
tagcgggtgtaggtctggcggc

SEQ ID NO: 1620 - DNA, 32 bp, Homo sapiens
ttgatctgtctttccgtgaggcagagcgtgtg

SEQ ID NO: 1621 - DNA, 22 bp, Homo sapiens
tttccgtgaggcagagcgtgtg

SEQ ID NO: 1622 - DNA, 35 bp, Homo sapiens
ccctcactcttcctcttcctcctctgcttcagccc

SEQ ID NO: 1623 - DNA, 24 bp, Homo sapiens
cctcttcctcctctgcttcagccc

SEQ ID NO: 1624 - DNA, 22 bp, Homo sapiens
ttcctcttcctcctctgcttca

SEQ ID NO: 1625 - DNA, 28 bp, Homo sapiens
tcgccgcttacgagtcagatagggatta

SEQ ID NO: 1626 - DNA, 22 bp, Homo sapiens
cgccgcttacgagtcagatagg

SEQ ID NO: 1627 - DNA, 27 bp, Homo sapiens
aggtctgtcggcctcgcctgcgtccgg

SEQ ID NO: 1628 - DNA, 22 bp, Homo sapiens
tctgtcggcctcgcctgcgtcc

SEQ ID NO: 1629 - DNA, 35 bp, Homo sapiens
cctgtctctctgtcagtcccagggcgtgcgatacc

SEQ ID NO: 1630 - DNA, 22 bp, Homo sapiens
ctgtcagtcccagggcgtgcga

SEQ ID NO: 1631 - DNA, 38 bp, Homo sapiens
ccttattcattttcttcattttcatccgccggttctga

SEQ ID NO: 1632 - DNA, 22 bp, Homo sapiens
tttcttcattttcatccgccgg

SEQ ID NO: 1633 - DNA, 37 bp, Homo sapiens
cgctttttccgggaagagcgagcgtgcagccagttgg

SEQ ID NO: 1634 - DNA, 22 bp, Homo sapiens
cgggaagagcgagcgtgcagcc

SEQ ID NO: 1635 - DNA, 35 bp, Homo sapiens
ggccacttcgtgcctacggtccctggtgaggtaca

SEQ ID NO: 1636 - DNA, 22 bp, Homo sapiens
gccacttcgtgcctacggtccc

SEQ ID NO: 1637 - DNA, 44 bp, Homo sapiens
ccgtgtcaggtagcggttgtagtgaaattccttctccagctcca

SEQ ID NO: 1638 - DNA, 25 bp, Homo sapiens
gcggttgtagtgaaattccttctcc

SEQ ID NO: 1639 - DNA, 22 bp, Homo sapiens
cgtgtcaggtagcggttgtagt

SEQ ID NO: 1640 - DNA, 30 bp, Homo sapiens
cgcgtgtaggcggtccgagagcgcttgggc

SEQ ID NO: 1641 - DNA, 22 bp, Homo sapiens
gcgtgtaggcggtccgagagcg

SEQ ID NO: 1642 - DNA, 20 bp, Homo sapiens
cggtccgagagcgcttgggc

SEQ ID NO: 1643 - DNA, 34 bp, Homo sapiens
gcgatctccaccctccggcgccgtgtcaggtagc

SEQ ID NO: 1644 - DNA, 22 bp, Homo sapiens
tccaccctccggcgccgtgtca

SEQ ID NO: 1645 - DNA, 41 bp, Homo sapiens
cagatcttgatctggcgctcggagaggcagagcgcgtgggc

SEQ ID NO: 1646 - DNA, 22 bp, Homo sapiens
cggagaggcagagcgcgtgggc

SEQ ID NO: 1647 - DNA, 41 bp, Homo sapiens
tcgagccccagagcgagcggcaggcgacaaatctcccctcc

SEQ ID NO: 1648 - DNA, 22 bp, Homo sapiens
ccccagagcgagcggcaggcga

SEQ ID NO: 1649 - DNA, 27 bp, Homo sapiens
gcgcccgcttggacgccgccgaccccg

SEQ ID NO: 1650 - DNA, 22 bp, Homo sapiens
cgcccgcttggacgccgccgac

SEQ ID NO: 1651 - DNA, 27 bp, Homo sapiens
gcagggtccgtggtgctggctgggcgc

SEQ ID NO: 1652 - DNA, 22 bp, Homo sapiens
gggtccgtggtgctggctgggc

SEQ ID NO: 1653 - DNA, 38 bp, Homo sapiens
gaatatctgtttggtgagggtggagttggtgccgggac

SEQ ID NO: 1654 - DNA, 22 bp, Homo sapiens
tgagggtggagttggtgccggg

SEQ ID NO: 1655 - DNA, 57 bp, Homo sapiens
cacagtctctctcttcctccccatcccctaatcctcgttcgccctttcccatcacag

SEQ ID NO: 1656 - DNA, 22 bp, Homo sapiens
cctcgttcgccctttcccatca

SEQ ID NO: 1657 - DNA, 35 bp, Homo sapiens
ggattcctttccgatgggttggcaggcagatggaa

SEQ ID NO: 1658 - DNA, 22 bp, Homo sapiens
ttccgatgggttggcaggcaga

SEQ ID NO: 1659 - DNA, 37 bp, Homo sapiens
gcccatcttcggctcgcttttggctcctgggtctctg

SEQ ID NO: 1660 - DNA, 22 bp, Homo sapiens
cggctcgcttttggctcctggg

SEQ ID NO: 1661 - DNA, 46 bp, Homo sapiens
cggagaaggagacgtggcggattggctgggtttcttggcggatttc

SEQ ID NO: 1662 - DNA, 22 bp, Homo sapiens
gagacgtggcggattggctggg

SEQ ID NO: 1663 - DNA, 22 bp, Homo sapiens
tggctgggtttcttggcggatt

SEQ ID NO: 1664 - DNA, 36 bp, Homo sapiens
gcagctgcgtgttggtgtaagccgtgcgcagcctgc

SEQ ID NO: 1665 - DNA, 22 bp, Homo sapiens
gcgtgttggtgtaagccgtgcg

SEQ ID NO: 1666 - DNA, 22 bp, Homo sapiens
ttggtgtaagccgtgcgcagcc

SEQ ID NO: 1667 - DNA, 27 bp, Homo sapiens
ccggcggctctcggtgctgcgtctgcc

SEQ ID NO: 1668 - DNA, 22 bp, Homo sapiens
cggcggctctcggtgctgcgtc

SEQ ID NO: 1669 - DNA, 29 bp, Homo sapiens
cgggttcctcggcagggtcgcagatgtcc

SEQ ID NO: 1670 - DNA, 22 bp, Homo sapiens
ctcggcagggtcgcagatgtcc

SEQ ID NO: 1671 - DNA, 38 bp, Homo sapiens
tcgagccccagagcgagcggcaggcgacaaatctcccc

SEQ ID NO: 1672 - DNA, 22 bp, Homo sapiens
ccccagagcgagcggcaggcga

SEQ ID NO: 1673 - DNA, 27 bp, Homo sapiens
gcgcccgcttggacgccgccgaccccg

SEQ ID NO: 1674 - DNA, 22 bp, Homo sapiens
cgcttggacgccgccgaccccg

SEQ ID NO: 1675 - DNA, 32 bp, Homo sapiens
gggttcgcagggtccgtggtgctggctgggcg

SEQ ID NO: 1676 - DNA, 22 bp, Homo sapiens
ggtccgtggtgctggctgggcg

SEQ ID NO: 1677 - DNA, 31 bp, Homo sapiens
tgcaggcggcaggagcataccccgagggcgc

SEQ ID NO: 1678 - DNA, 22 bp, Homo sapiens
gcaggcggcaggagcatacccc

SEQ ID NO: 1679 - DNA, 22 bp, Homo sapiens
caggagcataccccgagggcgc

SEQ ID NO: 1680 - DNA, 25 bp, Homo sapiens
ccgtagccatcggacaagcccccta

SEQ ID NO: 1681 - DNA, 22 bp, Homo sapiens
cgtagccatcggacaagccccc

SEQ ID NO: 1682 - DNA, 38 bp, Homo sapiens
gcctgggttgggagagcctgggatagggctggactggg

SEQ ID NO: 1683 - DNA, 22 bp, Homo sapiens
gcctgggttgggagagcctggg

SEQ ID NO: 1684 - DNA, 19 bp, Homo sapiens
gggatagggctggactggg

SEQ ID NO: 1685 - DNA, 24 bp, Homo sapiens
ggcctcccagcccctcagtgcgat

SEQ ID NO: 1686 - DNA, 22 bp, Homo sapiens
gcctcccagcccctcagtgcga

SEQ ID NO: 1687 - DNA, 45 bp, Homo sapiens
cccaaaccgactgatcccagctccccccgcaacaaaatcctacgc

SEQ ID NO: 1688 - DNA, 22 bp, Homo sapiens
gctccccccgcaacaaaatcct

SEQ ID NO: 1689 - DNA, 22 bp, Homo sapiens
tcccagctccccccgcaacaaa

SEQ ID NO: 1690 - DNA, 38 bp, Homo sapiens
cggtcttctctttccctccgctctccgcctccgctacg

SEQ ID NO: 1691 - DNA, 22 bp, Homo sapiens
ttccctccgctctccgcctccg

SEQ ID NO: 1692 - DNA, 30 bp, Homo sapiens
gcgctcctcacccgcctcttcacccgtttg

SEQ ID NO: 1693 - DNA, 22 bp, Homo sapiens
tcctcacccgcctcttcacccg

SEQ ID NO: 1694 - DNA, 35 bp, Homo sapiens
cggccccatcctcttcccccgtagccccaagtctc

SEQ ID NO: 1695 - DNA, 21 bp, Homo sapiens
ggccccatcctcttcccccgt

SEQ ID NO: 1696 - DNA, 24 bp, Homo sapiens
ggaccgcttgccgtccgtctctgg

SEQ ID NO: 1697 - DNA, 22 bp, Homo sapiens
accgcttgccgtccgtctctgg

SEQ ID NO: 1698 - DNA, 35 bp, Homo sapiens
gtgctccagcacctgcccccgacccgaaatataga

SEQ ID NO: 1699 - DNA, 22 bp, Homo sapiens
cacctgcccccgacccgaaata

SEQ ID NO: 1700 - DNA, 40 bp, Homo sapiens
accctgggtcggtagggatgcggaatgccaaggaaaagcg

SEQ ID NO: 1701 - DNA, 22 bp, Homo sapiens
tcggtagggatgcggaatgcca

SEQ ID NO: 1702 - DNA, 31 bp, Homo sapiens
ggcaaagccccccaccaacccccagcaaagt

SEQ ID NO: 1703 - DNA, 22 bp, Homo sapiens
agccccccaccaacccccagca

SEQ ID NO: 1704 - DNA, 42 bp, Homo sapiens
gctttcaaaaagccctgcccaaatcatcccgcccagaacctt

SEQ ID NO: 1705 - DNA, 22 bp, Homo sapiens
gccctgcccaaatcatcccgcc

SEQ ID NO: 1706 - DNA, 25 bp, Homo sapiens
gggcagggtcggtggtggaggaggg

SEQ ID NO: 1707 - DNA, 22 bp, Homo sapiens
gggcagggtcggtggtggagga

SEQ ID NO: 1708 - DNA, 36 bp, Homo sapiens
tgggctgtgatttggcgaaagcaggcggcgagggcg

SEQ ID NO: 1709 - DNA, 22 bp, Homo sapiens
gcgaaagcaggcggcgagggcg

SEQ ID NO: 1710 - DNA, 30 bp, Homo sapiens
cccacctttgggcttcttggcaggcactcc

SEQ ID NO: 1711 - DNA, 22 bp, Homo sapiens
tgggcttcttggcaggcactcc

SEQ ID NO: 1712 - DNA, 38 bp, Homo sapiens
agcctagtccatcaacccatacccacccaaaggccatg

SEQ ID NO: 1713 - DNA, 22 bp, Homo sapiens
acccatacccacccaaaggcca

SEQ ID NO: 1714 - DNA, 32 bp, Homo sapiens
gaaggatccttgcggctgatttatggcgagtc

SEQ ID NO: 1715 - DNA, 22 bp, Homo sapiens
ccttgcggctgatttatggcga

SEQ ID NO: 1716 - DNA, 41 bp, Homo sapiens
tccagactggagcccagagcccctttcacttgagccagcct

SEQ ID NO: 1717 - DNA, 22 bp, Homo sapiens
ggagcccagagcccctttcact

SEQ ID NO: 1718 - DNA, 38 bp, Homo sapiens
ttaaatattcacctcccgctcaactgcccatactaatg

SEQ ID NO: 1719 - DNA, 22 bp, Homo sapiens
tcacctcccgctcaactgccca

SEQ ID NO: 1720 - DNA, 41 bp, Homo sapiens
gcctggcactttgctcatccccccatcctttgcttccacca

SEQ ID NO: 1721 - DNA, 22 bp, Homo sapiens
ccccccatcctttgcttccacc

SEQ ID NO: 1722 - DNA, 49 bp, Homo sapiens
cgggctggcctctccgttccgctgctgctgcagaccccgaggcaggcgc

SEQ ID NO: 1723 - DNA, 22 bp, Homo sapiens
gcctctccgttccgctgctgct

SEQ ID NO: 1724 - DNA, 20 bp, Homo sapiens
gcagaccccgaggcaggcgc

SEQ ID NO: 1725 - DNA, 36 bp, Homo sapiens
tgtctactccttttcctactgcccgaccaagccagg

SEQ ID NO: 1726 - DNA, 22 bp, Homo sapiens
cctactgcccgaccaagccagg

SEQ ID NO: 1727 - DNA, 39 bp, Homo sapiens
cattttgaggcgtcccgcactcccacccaacattacact

SEQ ID NO: 1728 - DNA, 22 bp, Homo sapiens
cgtcccgcactcccacccaaca

SEQ ID NO: 1729 - DNA, 23 bp, Homo sapiens
gccgctcatcgccgccgctgccg

SEQ ID NO: 1730 - DNA, 22 bp, Homo sapiens
ccgctcatcgccgccgctgccg

SEQ ID NO: 1731 - DNA, 38 bp, Homo sapiens
gcccgttccccccgtcgccgcctgccgccttctcctgc

SEQ ID NO: 1732 - DNA, 22 bp, Homo sapiens
cgccgcctgccgccttctcctg

SEQ ID NO: 1733 - DNA, 37 bp, Homo sapiens
ggtcaagttgctgctgctgcggctgcgaatgctgctt

SEQ ID NO: 1734 - DNA, 22 bp, Homo sapiens
ttgctgctgctgcggctgcgaa

SEQ ID NO: 1735 - DNA, 28 bp, Homo sapiens
taatgttggtggtgaaggagcaagtggg

SEQ ID NO: 1736 - DNA, 22 bp, Homo sapiens
tggtggtgaaggagcaagtggg

SEQ ID NO: 1737 - DNA, 31 bp, Homo sapiens
tcctgcacttcgggactggacacggagacct

SEQ ID NO: 1738 - DNA, 22 bp, Homo sapiens
tgcacttcgggactggacacgg

SEQ ID NO: 1739 - DNA, 32 bp, Homo sapiens
aaacgtgaggttggcggtcagttctcggatcc

SEQ ID NO: 1740 - DNA, 23 bp, Homo sapiens
aggttggcggtcagttctcggat

SEQ ID NO: 1741 - DNA, 34 bp, Homo sapiens
ggccctggaacgcggtgccccctctccaatcctg

SEQ ID NO: 1742 - DNA, 22 bp, Homo sapiens
cgcggtgccccctctccaatcc

SEQ ID NO: 1743 - DNA, 25 bp, Homo sapiens
tggccgcgccacgagggttgagctg

SEQ ID NO: 1744 - DNA, 22 bp, Homo sapiens
ccgcgccacgagggttgagctg

SEQ ID NO: 1745 - DNA, 36 bp, Homo sapiens
gccaccaccgttcgacgcagccacccgcactttctg

SEQ ID NO: 1746 - DNA, 22 bp, Homo sapiens
cgacgcagccacccgcactttc

SEQ ID NO: 1747 - DNA, 26 bp, Homo sapiens
ggccccaaatacaagcaagcccccat

SEQ ID NO: 1748 - DNA, 22 bp, Homo sapiens
gccccaaatacaagcaagcccc

SEQ ID NO: 1749 - DNA, 27 bp, Homo sapiens
gggtgggctgggatggtggcaagggca

SEQ ID NO: 1750 - DNA, 22 bp, Homo sapiens
gggctgggatggtggcaagggc

SEQ ID NO: 1751 - DNA, 44 bp, Homo sapiens
tggaggctccacacgcccccacctactcgcacccccttccagag

SEQ ID NO: 1752 - DNA, 22 bp, Homo sapiens
cgcccccacctactcgcacccc

SEQ ID NO: 1753 - DNA, 41 bp, Homo sapiens
attaatgtagttccagtccccagcaccccattcccctcagg

SEQ ID NO: 1754 - DNA, 22 bp, Homo sapiens
ccccagcaccccattcccctca

SEQ ID NO: 1755 - DNA, 29 bp, Homo sapiens
tgcgcccacagccgagcagccagccacat

SEQ ID NO: 1756 - DNA, 22 bp, Homo sapiens
cgcccacagccgagcagccagc

SEQ ID NO: 1757 - DNA, 34 bp, Homo sapiens
tcctcaaacacacccacataccccaggcttgcgg

SEQ ID NO: 1758 - DNA, 22 bp, Homo sapiens
cccacataccccaggcttgcgg

SEQ ID NO: 1759 - DNA, 29 bp, Homo sapiens
gctttttccgggtggagcgagcgtggatc

SEQ ID NO: 1760 - DNA, 22 bp, Homo sapiens
ccgggtggagcgagcgtggatc

SEQ ID NO: 1761 - DNA, 32 bp, Homo sapiens
ggttgagaatcctggccacctcgtagcgccgg

SEQ ID NO: 1762 - DNA, 22 bp, Homo sapiens
aatcctggccacctcgtagcgc

SEQ ID NO: 1763 - DNA, 30 bp, Homo sapiens
agctcaagcgtctggtatttggtgtaggga

SEQ ID NO: 1764 - DNA, 24 bp, Homo sapiens
agcgtctggtatttggtgtaggga

SEQ ID NO: 1765 - DNA, 40 bp, Homo sapiens
gggcttcctttttcgtttccccgtccttcacctcctgccg

SEQ ID NO: 1766 - DNA, 22 bp, Homo sapiens
ccccgtccttcacctcctgccg

SEQ ID NO: 1767 - DNA, 35 bp, Homo sapiens
cctgtctctcggtgagggctagggcgtgggaaacc

SEQ ID NO: 1768 - DNA, 22 bp, Homo sapiens
cggtgagggctagggcgtggga

SEQ ID NO: 1769 - DNA, 29 bp, Homo sapiens
gggcacgcagggcagggcacggcggaggt

SEQ ID NO: 1770 - DNA, 22 bp, Homo sapiens
cagggcagggcacggcggaggt

SEQ ID NO: 1771 - DNA, 31 bp, Homo sapiens
gggcttggccccctcctcgtctgtgcccatg

SEQ ID NO: 1772 - DNA, 23 bp, Homo sapiens
gccccctcctcgtctgtgcccat

SEQ ID NO: 1773 - DNA, 25 bp, Homo sapiens
gcgccgagccacccgccgcctgcac

SEQ ID NO: 1774 - DNA, 22 bp, Homo sapiens
cgccgagccacccgccgcctgc

SEQ ID NO: 1775 - DNA, 33 bp, Homo sapiens
aggggccagaggcaccgtagagcgaggcacccg

SEQ ID NO: 1776 - DNA, 22 bp, Homo sapiens
gcaccgtagagcgaggcacccg

SEQ ID NO: 1777 - DNA, 28 bp, Homo sapiens
agcaccagggctggaggaatcggctggc

SEQ ID NO: 1778 - DNA, 22 bp, Homo sapiens
agggctggaggaatcggctggc

SEQ ID NO: 1779 - DNA, 35 bp, Homo sapiens
agtgtgagggttaaagggaaggcggctggcggtgc

SEQ ID NO: 1780 - DNA, 22 bp, Homo sapiens
aagggaaggcggctggcggtgc

SEQ ID NO: 1781 - DNA, 27 bp, Homo sapiens
ggcaacgccaatcgccttcccatcccc

SEQ ID NO: 1782 - DNA, 22 bp, Homo sapiens
cgccaatcgccttcccatcccc

SEQ ID NO: 1783 - DNA, 22 bp, Homo sapiens
gggtcctctcgggcttctcggg

SEQ ID NO: 1784 - DNA, 24 bp, Homo sapiens
gggccgccgagagggaaggagagg

SEQ ID NO: 1785 - DNA, 22 bp, Homo sapiens
gccgccgagagggaaggagagg

SEQ ID NO: 1786 - DNA, 29 bp, Homo sapiens
gccagaggcaccgtagagcgaggcacccg

SEQ ID NO: 1787 - DNA, 22 bp, Homo sapiens
gcaccgtagagcgaggcacccg

SEQ ID NO: 1788 - DNA, 28 bp, Homo sapiens
cagggctggaggaatcggctggcccaca

SEQ ID NO: 1789 - DNA, 22 bp, Homo sapiens
agggctggaggaatcggctggc

SEQ ID NO: 1790 - DNA, 31 bp, Homo sapiens
tgagggttaaagggaaggcggctggcggtgc

SEQ ID NO: 1791 - DNA, 22 bp, Homo sapiens
aagggaaggcggctggcggtgc

SEQ ID NO: 1792 - DNA, 31 bp, Homo sapiens
acacatctgtgttttccctgccccccagagc

SEQ ID NO: 1793 - DNA, 22 bp, Homo sapiens
tctgtgttttccctgcccccca

SEQ ID NO: 1794 - DNA, 32 bp, Homo sapiens
catcttctgaattttccgacttgaccgaggcg

SEQ ID NO: 1795 - DNA, 22 bp, Homo sapiens
attttccgacttgaccgaggcg

SEQ ID NO: 1796 - DNA, 31 bp, Homo sapiens
ccggttcctgcatccacgccgctccatcttc

SEQ ID NO: 1797 - DNA, 22 bp, Homo sapiens
gcatccacgccgctccatcttc

SEQ ID NO: 1798 - DNA, 43 bp, Homo sapiens
gggtgcaggtggtagggctcgtatgtcttggcggcggcgaata

SEQ ID NO: 1799 - DNA, 22 bp, Homo sapiens
tcgtatgtcttggcggcggcga

SEQ ID NO: 1800 - DNA, 36 bp, Homo sapiens
cagggcgaggagctgggatgtggtaaagggcgtgcg

SEQ ID NO: 1801 - DNA, 22 bp, Homo sapiens
gggatgtggtaaagggcgtgcg

SEQ ID NO: 1802 - DNA, 29 bp, Homo sapiens
ccaacaggcgggatgggaagcacaggtct

SEQ ID NO: 1803 - DNA, 22 bp, Homo sapiens
gcgggatgggaagcacaggtct

SEQ ID NO: 1804 - DNA, 25 bp, Homo sapiens
ggcttggtgcctccgcctacagaac

SEQ ID NO: 1805 - DNA, 22 bp, Homo sapiens
gcttggtgcctccgcctacaga

SEQ ID NO: 1806 - DNA, 34 bp, Homo sapiens
agcgacaggcttcttggtggctggcgtggagagg

SEQ ID NO: 1807 - DNA, 22 bp, Homo sapiens
ggcttcttggtggctggcgtgg

SEQ ID NO: 1808 - DNA, 36 bp, Homo sapiens
tctcacgtttcttttgcttcattcggcggttctgga

SEQ ID NO: 1809 - DNA, 22 bp, Homo sapiens
tgcttcattcggcggttctgga

SEQ ID NO: 1810 - DNA, 36 bp, Homo sapiens
gaggattcctcggccttctcgtcgtttcctggcggg

SEQ ID NO: 1811 - DNA, 22 bp, Homo sapiens
ccttctcgtcgtttcctggcgg

SEQ ID NO: 1812 - DNA, 24 bp, Homo sapiens
cagcgatctccacctgcgggcgcg

SEQ ID NO: 1813 - DNA, 21 bp, Homo sapiens
cgatctccacctgcgggcgcg

SEQ ID NO: 1814 - DNA, 17 bp, Homo sapiens
atctccacctgcgggcg

SEQ ID NO: 1815 - DNA, 32 bp, Homo sapiens
gctaatctctaggcgccgctctcgagtaaggt

SEQ ID NO: 1816 - DNA, 22 bp, Homo sapiens
aatctctaggcgccgctctcga

SEQ ID NO: 1817 - DNA, 28 bp, Homo sapiens
gtgaggtggacgctgcggctaatctcta

SEQ ID NO: 1818 - DNA, 24 bp, Homo sapiens
tgaggtggacgctgcggctaatct

SEQ ID NO: 1819 - DNA, 35 bp, Homo sapiens
ttctttacgtggccagcagcatccccttcccttct

SEQ ID NO: 1820 - DNA, 22 bp, Homo sapiens
tggccagcagcatccccttccc

SEQ ID NO: 1821 - DNA, 38 bp, Homo sapiens
cctcacatgctctctccccaatgcctccgtttctccag

SEQ ID NO: 1822 - DNA, 22 bp, Homo sapiens
tgctctctccccaatgcctccg

SEQ ID NO: 1823 - DNA, 23 bp, Homo sapiens
ggcctccgccaatcgctcgtctg

SEQ ID NO: 1824 - DNA, 22 bp, Homo sapiens
gcctccgccaatcgctcgtctg

SEQ ID NO: 1825 - DNA, 24 bp, Homo sapiens
gggcgtcaggagggaggatcggaa

SEQ ID NO: 1826 - DNA, 22 bp, Homo sapiens
gggcgtcaggagggaggatcgg

SEQ ID NO: 1827 - DNA, 23 bp, Homo sapiens
ctctccgtcaggcacagggcgtg

SEQ ID NO: 1828 - DNA, 22 bp, Homo sapiens
ctctccgtcaggcacagggcgt

SEQ ID NO: 1829 - DNA, 25 bp, Homo sapiens
cacagggcgtgcgcgatctcgatgc

SEQ ID NO: 1830 - DNA, 22 bp, Homo sapiens
agggcgtgcgcgatctcgatgc

SEQ ID NO: 1831 - DNA, 30 bp, Homo sapiens
gaaccatattttcctctgcctctccgtcag

SEQ ID NO: 1832 - DNA, 22 bp, Homo sapiens
attttcctctgcctctccgtca

SEQ ID NO: 1833 - DNA, 26 bp, Homo sapiens
gcgttggcgatctcgatgcggcggcg

SEQ ID NO: 1834 - DNA, 22 bp, Homo sapiens
cgttggcgatctcgatgcggcg

SEQ ID NO: 1835 - DNA, 36 bp, Homo sapiens
ggaaccatatcttgctctgtcgctcggtcaggcaaa

SEQ ID NO: 1836 - DNA, 22 bp, Homo sapiens
atcttgctctgtcgctcggtca

SEQ ID NO: 1837 - DNA, 38 bp, Homo sapiens
tttctcgtcttccctcattctgtgccgctgccgagcct

SEQ ID NO: 1838 - DNA, 22 bp, Homo sapiens
ccctcattctgtgccgctgccg

SEQ ID NO: 1839 - DNA, 36 bp, Homo sapiens
tcccagctggaccaggcaggtagaggcagcgggatg

SEQ ID NO: 1840 - DNA, 22 bp, Homo sapiens
ccaggcaggtagaggcagcggg

SEQ ID NO: 1841 - DNA, 40 bp, Homo sapiens
aacctggtaatgtcctctgcccgttgctgctccggcggcg

SEQ ID NO: 1842 - DNA, 22 bp, Homo sapiens
tcctctgcccgttgctgctccg

SEQ ID NO: 1843 - DNA, 25 bp, Homo sapiens
gcccccgcgagcgctgctgtcactc

SEQ ID NO: 1844 - DNA, 22 bp, Homo sapiens
gcccccgcgagcgctgctgtca

SEQ ID NO: 1845 - DNA, 25 bp, Homo sapiens
ctcagggtagctagggcgcggaggc

SEQ ID NO: 1846 - DNA, 22 bp, Homo sapiens
agggtagctagggcgcggaggc

SEQ ID NO: 1847 - DNA, 22 bp, Homo sapiens
cctcgcgaattgccgggcccct

SEQ ID NO: 1848 - DNA, 23 bp, Homo sapiens
cggcgtggcgctctgggagtggt

SEQ ID NO: 1849 - DNA, 22 bp, Homo sapiens
cggcgtggcgctctgggagtgg

SEQ ID NO: 1850 - DNA, 24 bp, Homo sapiens
cgttgctgctccggcggcgtggcg

SEQ ID NO: 1851 - DNA, 22 bp, Homo sapiens
ttgctgctccggcggcgtggcg

SEQ ID NO: 1852 - DNA, 24 bp, Homo sapiens
gggccagagggtcgggaaggaaga

SEQ ID NO: 1853 - DNA, 22 bp, Homo sapiens
gccagagggtcgggaaggaaga

SEQ ID NO: 1854 - DNA, 23 bp, Homo sapiens
cctgggactggctgggcgagact

SEQ ID NO: 1855 - DNA, 22 bp, Homo sapiens
cctgggactggctgggcgagac

SEQ ID NO: 1856 - DNA, 27 bp, Homo sapiens
ggagagtctcgcccagccagtcccagg

SEQ ID NO: 1857 - DNA, 22 bp, Homo sapiens
gtctcgcccagccagtcccagg

SEQ ID NO: 1858 - DNA, 38 bp, Homo sapiens
caaagcatggaactggcggtagcggcggtagatgaggt

SEQ ID NO: 1859 - DNA, 22 bp, Homo sapiens
tggaactggcggtagcggcggt

SEQ ID NO: 1860 - DNA, 30 bp, Homo sapiens
catgtaggcgttgagggcaggtatccgcat

SEQ ID NO: 1861 - DNA, 22 bp, Homo sapiens
aggcgttgagggcaggtatccg

SEQ ID NO: 1862 - DNA, 40 bp, Homo sapiens
cgctacgtcctcatccgacagcgaccgaaccagatccccc

SEQ ID NO: 1863 - DNA, 22 bp, Homo sapiens
tcatccgacagcagccgaacca

SEQ ID NO: 1864 - DNA, 40 bp, Homo sapiens
ccacctgtgcaagcctctgttctaagcgcccggcggaatt

SEQ ID NO: 1865 - DNA, 22 bp, Homo sapiens
gttctaagcgcccggcggaatt

SEQ ID NO: 1866 - DNA, 29 bp, Homo sapiens
ggtcttggctccccatcgttgctcctttt

SEQ ID NO: 1867 - DNA, 22 bp, Homo sapiens
ggctccccatcgttgctccttt

SEQ ID NO: 1868 - DNA, 29 bp, Homo sapiens
gaagcggcttctatgggcgtcgtcttctt

SEQ ID NO: 1869 - DNA, 22 bp, Homo sapiens
gcggcttctatgggcgtcgtct

SEQ ID NO: 1870 - DNA, 25 bp, Homo sapiens
gcctttcgctcctgttgcctcctgg

SEQ ID NO: 1871 - DNA, 22 bp, Homo sapiens
gcctttcgctcctgttgcctcc

SEQ ID NO: 1872 - DNA, 48 bp, Homo sapiens
tagtcattctcaggctcgggctcaggctcgggctcaggctcaggctct

SEQ ID NO: 1873 - DNA, 22 bp, Homo sapiens
ggctcgggctcaggctcgggct

SEQ ID NO: 1874 - DNA, 43 bp, Homo sapiens
ctgagatccccagagccacagccccagccccagccccagccgg

SEQ ID NO: 1875 - DNA, 22 bp, Homo sapiens
ccccagagccacagccccagcc

SEQ ID NO: 1876 - DNA, 22 bp, Homo sapiens
ccccagccccagccccagccgg

SEQ ID NO: 1877 - DNA, 34 bp, Homo sapiens
gcaacgtccccgccaccagccctcgtccaccatc

SEQ ID NO: 1878 - DNA, 22 bp, Homo sapiens
ccccgccaccagccctcgtcca

SEQ ID NO: 1879 - DNA, 63 bp, Homo sapiens
agtcatatcccagagctgctttgtcccatttatccttctccaccccgtaccggccaccaaagc

SEQ ID NO: 1880 - DNA, 22 bp, Homo sapiens
tccaccccgtaccggccaccaa

SEQ ID NO: 1881 - DNA, 39 bp, Homo sapiens
cctcagccatggactcaaatttcgccttcagcccacggg

SEQ ID NO: 1882 - DNA, 22 bp, Homo sapiens
aatttcgccttcagcccacggg

SEQ ID NO: 1883 - DNA, 44 bp, Homo sapiens
ttgggcttccccccgctccccacttcgccagcgcccgctcctcg

SEQ ID NO: 1884 - DNA, 22 bp, Homo sapiens
cttcgccagcgcccgctcctcg

SEQ ID NO: 1885 - DNA, 45 bp, Homo sapiens
gcagcatcctcgcattcagccaacccccccagtccccagaagcac

SEQ ID NO: 1886 - DNA, 22 bp, Homo sapiens
cagccaacccccccagtcccca

SEQ ID NO: 1887 - DNA, 22 bp, Homo sapiens
tcgcattcagccaaccccccca

SEQ ID NO: 1888 - DNA, 29 bp, Homo sapiens
ggcttccccccgctccccacttcgccagc

SEQ ID NO: 1889 - DNA, 22 bp, Homo sapiens
cccccgctccccacttcgccag

SEQ ID NO: 1890 - DNA, 40 bp, Homo sapiens
gccacttctgccgccccgtctccgcatccaaccaccccga

SEQ ID NO: 1891 - DNA, 21 bp, Homo sapiens
gccgccccgtctccgcatcca

SEQ ID NO: 1892 - DNA, 32 bp, Homo sapiens
gcattgttagccatccgcctctccttctccct

SEQ ID NO: 1893 - DNA, 22 bp, Homo sapiens
gccatccgcctctccttctccc

SEQ ID NO: 1894 - DNA, 34 bp, Homo sapiens
gatgggttcctggcagtgtggttggcggctctgc

SEQ ID NO: 1895 - DNA, 22 bp, Homo sapiens
tggcagtgtggttggcggctct

SEQ ID NO: 1896 - DNA, 34 bp, Homo sapiens
gctcctggaaacggcgagcgagagtgaggagagg

SEQ ID NO: 1897 - DNA, 22 bp, Homo sapiens
tggaaacggcgagcgagagtga

SEQ ID NO: 1898 - DNA, 32 bp, Homo sapiens
tgccgcgctgcttgggctgctccgtgatgacc

SEQ ID NO: 1899 - DNA, 22 bp, Homo sapiens
cgctgcttgggctgctccgtga

SEQ ID NO: 1900 - DNA, 36 bp, Homo sapiens
agcgtcttgctggcctcggtgctgctctccccaagg

SEQ ID NO: 1901 - DNA, 22 bp, Homo sapiens
gcctcggtgctgctctccccaa

SEQ ID NO: 1902 - DNA, 40 bp, Homo sapiens
aggcagtcacctccacctcccgcagccctccacaatcccg

SEQ ID NO: 1903 - DNA, 22 bp, Homo sapiens
cccgcagccctccacaatcccg

SEQ ID NO: 1904 - DNA, 22 bp, Homo sapiens
ctccacctcccgcagccctcca

SEQ ID NO: 1905 - DNA, 38 bp, Homo sapiens
tgctgaacaccactgatatgtcctctttgtgcaccttg

SEQ ID NO: 1906 - DNA, 22 bp, Homo sapiens
tcgtagggcggcgtcttgaaca

SEQ ID NO: 1907 - DNA, 30 bp, Homo sapiens
ggcaggtacgtgaaaggcaatggctcgctg

SEQ ID NO: 1908 - DNA, 22 bp, Homo sapiens
cgtgaaaggcaatggctcgctg

SEQ ID NO: 1909 - DNA, 33 bp, Homo sapiens
ggcatcccccgtttcgccttcttgtccacgccg

SEQ ID NO: 1910 - DNA, 22 bp, Homo sapiens
tttcgccttcttgtccacgccg

SEQ ID NO: 1911 - DNA, 27 bp, Homo sapiens
ggctttttcttccgccgtttgctctcg

SEQ ID NO: 1912 - DNA, 22 bp, Homo sapiens
tttcttccgccgtttgctctcg

SEQ ID NO: 1913 - DNA, 24 bp, Homo sapiens
gccgtggttgggcaggaagtggtc

SEQ ID NO: 1914 - DNA, 22 bp, Homo sapiens
ccgtggttgggcaggaagtggt

SEQ ID NO: 1915 - DNA, 31 bp, Homo sapiens
ggcagcagggctgacggcgggaggaacgggc

SEQ ID NO: 1916 - DNA, 22 bp, Homo sapiens
gctgacggcgggaggaacgggc

SEQ ID NO: 1917 - DNA, 37 bp, Homo sapiens
ggattgcacggctcctccacctccctccccacccagt

SEQ ID NO: 1918 - DNA, 23 bp, Homo sapiens
tcctccacctccctccccaccca

SEQ ID NO: 1919 - DNA, 33 bp, Homo sapiens
agaggtcttgtgctctgggcggtgtgcaaatgc

SEQ ID NO: 1920 - DNA, 22 bp, Homo sapiens
gctctgggcggtgtgcaaatgc

SEQ ID NO: 1921 - DNA, 27 bp, Homo sapiens
cccacaaatgccttcccgaataccatg

SEQ ID NO: 1922 - DNA, 22 bp, Homo sapiens
ttcccacaaatgccttcccgaa

SEQ ID NO: 1923 - DNA, 47 bp, Homo sapiens
tctcttctccttcaggaccttgtcggccatggcttttctctcctccc

SEQ ID NO: 1924 - DNA, 24 bp, Homo sapiens
cggccatggcttttctctcctccc

SEQ ID NO: 1925 - DNA, 22 bp, Homo sapiens
ttcaggaccttgtcggccatgg

SEQ ID NO: 1926 - DNA, 36 bp, Homo sapiens
gcatgcctgtgcccctttcggaataacggagtcaat

SEQ ID NO: 1927 - DNA, 22 bp, Homo sapiens
gcatgcctgtgcccctttcgga

SEQ ID NO: 1928 - DNA, 22 bp, Homo sapiens
tgcccctttcggaataacggag

SEQ ID NO: 1929 - DNA, 35 bp, Homo sapiens
ctgagagtcccagcgtccctgccaggtaactgtct

SEQ ID NO: 1930 - DNA, 22 bp, Homo sapiens
gagtcccagcgtccctgccagg

SEQ ID NO: 1931 - DNA, 49 bp, Homo sapiens
ccacaccacaccagggctgtcaccacggcaggcctggatgatgatcacc

SEQ ID NO: 1932 - DNA, 22 bp, Homo sapiens
agggctgtcaccacggcaggcc

SEQ ID NO: 1933 - DNA, 22 bp, Homo sapiens
cggcaggcctggatgatgatca

SEQ ID NO: 1934 - DNA, 54 bp, Homo sapiens
ccacacactcccaatatcctgcgtcccctgtcagcggccatcagctccttgtgc

SEQ ID NO: 1935 - DNA, 22 bp, Homo sapiens
agcggccatcagctccttgtgc

SEQ ID NO: 1936 - DNA, 22 bp, Homo sapiens
cctgcgtcccctgtcagcggcc

SEQ ID NO: 1937 - DNA, 22 bp, Homo sapiens
tcccaatatcctgcgtcccctg

SEQ ID NO: 1938 - DNA, 39 bp, Homo sapiens
ggtttgttctgtaggcttgggcagttggcgttgtcaaag

SEQ ID NO: 1939 - DNA, 22 bp, Homo sapiens
ggcttgggcagttggcgttgtc

SEQ ID NO: 1940 - DNA, 37 bp, Homo sapiens
aacttttctttaccggcatcactctcctcgcacccag

SEQ ID NO: 1941 - DNA, 22 bp, Homo sapiens
cggcatcactctcctcgcaccc

SEQ ID NO: 1942 - DNA, 25 bp, Homo sapiens
ctgggaacaggtagaggtggcggca

SEQ ID NO: 1943 - DNA, 24 bp, Homo sapiens
tgggaacaggtagaggtggcggca

SEQ ID NO: 1944 - DNA, 45 bp, Homo sapiens
ggtgagcaacatatcctccaggtggccttgcttggtctccctcag

SEQ ID NO: 1945 - DNA, 24 bp, Homo sapiens
ggtggccttgcttggtctccctca

SEQ ID NO: 1946 - DNA, 25 bp, Homo sapiens
ccacgaggccgagactgcaacctat

SEQ ID NO: 1947 - DNA, 22 bp, Homo sapiens
ccacgaggccgagactgcaacc

SEQ ID NO: 1948 - DNA, 24 bp, Homo sapiens
cacggcaggcctggatgaagaaca

SEQ ID NO: 1949 - DNA, 27 bp, Homo sapiens
cgcatggcggcagtccctttgaggcag

SEQ ID NO: 1950 - DNA, 22 bp, Homo sapiens
tggcggcagtccctttgaggca

SEQ ID NO: 1951 - DNA, 38 bp, Homo sapiens
ctcatagagcaagagaggcggtggcagcagtgaacaga

SEQ ID NO: 1952 - DNA, 22 bp, Homo sapiens
gcaagagaggcggtggcagcag

SEQ ID NO: 1953 - DNA, 37 bp, Homo sapiens
ccagtagtattcgctccttaaatcgttccctccctct

SEQ ID NO: 1954 - DNA, 25 bp, Homo sapiens
cgctccttaaatcgttccctccctc

SEQ ID NO: 1955 - DNA, 46 bp, Homo sapiens
gactagagtactgtggtccacatcccctccagagcgaaattccagt

SEQ ID NO: 1956 - DNA, 22 bp, Homo sapiens
ggtccacatcccctccagagcg

SEQ ID NO: 1957 - DNA, 41 bp, Homo sapiens
ctgcagtactgaagggaacgcacaggccgcttctggacact

SEQ ID NO: 1958 - DNA, 22 bp, Homo sapiens
ggaacgcacaggccgcttctgg

SEQ ID NO: 1959 - DNA, 44 bp, Homo sapiens
agccaagagtgtccttccactgggtggcgctgcagtactgaagg

SEQ ID NO: 1960 - DNA, 22 bp, Homo sapiens
ccttccactgggtggcgctgca

SEQ ID NO: 1961 - DNA, 30 bp, Homo sapiens
gctgcggtgccttgagcccaaacgagccaa

SEQ ID NO: 1962 - DNA, 22 bp, Homo sapiens
tgcggtgccttgagcccaaacg

SEQ ID NO: 1963 - DNA, 26 bp, Homo sapiens
gatgctccccacgaggctcatttcag

SEQ ID NO: 1964 - DNA, 25 bp, Homo sapiens
gatgctccccacgaggctcatttca

SEQ ID NO: 1965 - DNA, 34 bp, Homo sapiens
gcgactttcatgattcttggcgactggctgaaac

SEQ ID NO: 1966 - DNA, 22 bp, Homo sapiens
atgattcttggcgactggctga

SEQ ID NO: 1967 - DNA, 23 bp, Homo sapiens
cgcggcggcggtggcggtgctgc

SEQ ID NO: 1968 - DNA, 22 bp, Homo sapiens
gcggcggcggtggcggtgctgc

SEQ ID NO: 1969 - DNA, 35 bp, Homo sapiens
agcgcaccacctcgcccgcaccgctcgctgtcttg

SEQ ID NO: 1970 - DNA, 22 bp, Homo sapiens
accacctcgcccgcaccgctcg

SEQ ID NO: 1971 - DNA, 28 bp, Homo sapiens
gctcgtccagcagggcaggcaggcgcgc

SEQ ID NO: 1972 - DNA, 22 bp, Homo sapiens
cgtccagcagggcaggcaggcg

SEQ ID NO: 1973 - DNA, 36 bp, Homo sapiens
ggagaatctccaccttgcactccttgcggttctggg

SEQ ID NO: 1974 - DNA, 22 bp, Homo sapiens
ctccaccttgctcaccttgcgg

SEQ ID NO: 1975 - DNA, 38 bp, Homo sapiens
gcgccctctcctcgccagtgcctcagcctcagccccag

SEQ ID NO: 1976 - DNA, 22 bp, Homo sapiens
cgccagtgcctcagcctcagcc

SEQ ID NO: 1977 - DNA, 28 bp, Homo sapiens
gtggaatcccaccccctaaagtctctgg

SEQ ID NO: 1978 - DNA, 22 bp, Homo sapiens
tcccaccccctaaagtctctgg

SEQ ID NO: 1979 - DNA, 36 bp, Homo sapiens
gtttaataacaaaaaaacagccccacagaactattg

SEQ ID NO: 1980 - DNA, 22 bp, Homo sapiens
caaaaaaacagccccacagaac

SEQ ID NO: 1981 - DNA, 23 bp, Homo sapiens
ggccgccgctgccgcctgctgag

SEQ ID NO: 1982 - DNA, 22 bp, Homo sapiens
gccgccgctgccgcctgctgag

SEQ ID NO: 1983 - DNA, 36 bp, Homo sapiens
aggctgtttttcctaacggacctcacgggactgaag

SEQ ID NO: 1984 - DNA, 22 bp, Homo sapiens
cctaacggacctcacgggactg

SEQ ID NO: 1985 - DNA, 37 bp, Homo sapiens
catgttgtatagcaggctcatcgggtcgtccacaggg

SEQ ID NO: 1986 - DNA, 22 bp, Homo sapiens
gctcatcgggtcgtccacaggg

SEQ ID NO: 1987 - DNA, 41 bp, Homo sapiens
tgatgcaggctgacaatagtgggatgcgagtccagggcgat

SEQ ID NO: 1988 - DNA, 22 bp, Homo sapiens
ggctgacaatagtgggatgcga

SEQ ID NO: 1989 - DNA, 35 bp, Homo sapiens
cgcgagaagggcgagaccgggaggagctggctgcc

SEQ ID NO: 1990 - DNA, 22 bp, Homo sapiens
ggcgagaccgggaggagctggc

SEQ ID NO: 1991 - DNA, 27 bp, Homo sapiens
ggatgcgagtccagggcgatctgcagg

SEQ ID NO: 1992 - DNA, 22 bp, Homo sapiens
tgcgagtccagggcgatctgca

SEQ ID NO: 1993 - DNA, 33 bp, Homo sapiens
gcgtaatggagcgctggttctgcccgggtctct

SEQ ID NO: 1994 - DNA, 22 bp, Homo sapiens
tggagcgctggttctgcccggg

SEQ ID NO: 1995 - DNA, 34 bp, Homo sapiens
ccgtgttgagggtggtcagcggcgtcctggagcg

SEQ ID NO: 1996 - DNA, 22 bp, Homo sapiens
tggtcagcggcgtcctggagcg

SEQ ID NO: 1997 - DNA, 29 bp, Homo sapiens
ctgagattgcagaaggaggagggaaaggg

SEQ ID NO: 1998 - DNA, 23 bp, Homo sapiens
ttgcagaaggaggagggaaaggg

SEQ ID NO: 1999 - DNA, 32 bp, Homo sapiens
ggaattagtgccgccttgttccccaatttgct

SEQ ID NO: 2000 - DNA, 22 bp, Homo sapiens
attagtgccgccttgttcccca

SEQ ID NO: 2001 - DNA, 35 bp, Homo sapiens
agcaaagaagctccccccaccccccgtttttttta

SEQ ID NO: 2002 - DNA, 22 bp, Homo sapiens
gctccccccaccccccgttttt

SEQ ID NO: 2003 - DNA, 41 bp, Homo sapiens
tttgagcttccctgcccctgccagtccgccttagccaacac

SEQ ID NO: 2004 - DNA, 22 bp, Homo sapiens
tgccagtccgccttagccaaca

SEQ ID NO: 2005 - DNA, 39 bp, Homo sapiens
tgcgttccgacaggcagcacaccgcctcgtagcagccgc

SEQ ID NO: 2006 - DNA, 22 bp, Homo sapiens
cacaccgcctcgtagcagccgc

SEQ ID NO: 2007 - DNA, 22 bp, Homo sapiens
cgttccgacaggcagcacaccg

SEQ ID NO: 2008 - DNA, 24 bp, Homo sapiens
ccgcaggcgggagtagcagtggtt

SEQ ID NO: 2009 - DNA, 23 bp, Homo sapiens
cgcaggcgggagtagcagtggtt

SEQ ID NO: 2010 - DNA, 43 bp, Homo sapiens
acctccagcctgataactccgccccccacgctgcccccaccca

SEQ ID NO: 2011 - DNA, 22 bp, Homo sapiens
taactccgccccccacgctgcc

SEQ ID NO: 2012 - DNA, 34 bp, Homo sapiens
tttggtgaagtcaagtgggcagggcgaagttggg

SEQ ID NO: 2013 - DNA, 22 bp, Homo sapiens
aagtgggcagggcgaagttggg

SEQ ID NO: 2014 - DNA, 37 bp, Homo sapiens
tgaacccttctctctccaccccatcccctctcaacca

SEQ ID NO: 2015 - DNA, 22 bp, Homo sapiens
ccaccccatcccctctcaacca

SEQ ID NO: 2016 - DNA, 25 bp, Homo sapiens
cccagacggctgagtgagggtaggg

SEQ ID NO: 2017 - DNA, 22 bp, Homo sapiens
agacggctgagtgagggtaggg

SEQ ID NO: 2018 - DNA, 22 bp, Homo sapiens
gactccccctggctggctttag

SEQ ID NO: 2019 - DNA, 48 bp, Homo sapiens
aatagtgaccaggatgacaccccaccccttttcggtctgcctccctgg

SEQ ID NO: 2020 - DNA, 22 bp, Homo sapiens
ccccttttcggtctgcctccct

SEQ ID NO: 2021 - DNA, 22 bp, Homo sapiens
gaccaggatgacaccccacccc

SEQ ID NO: 2022 - DNA, 25 bp, Homo sapiens
tgctccactcgggcaacagacgctg

SEQ ID NO: 2023 - DNA, 22 bp, Homo sapiens
gctccactcgggcaacagacgc

SEQ ID NO: 2024 - DNA, 34 bp, Homo sapiens
gcagaaagcctaccctgccccgtgtgctgtctgg

SEQ ID NO: 2025 - DNA, 22 bp, Homo sapiens
ccctgccccgtgtgctgtctgg

SEQ ID NO: 2026 - DNA, 24 bp, Homo sapiens
gccatcttttcaccctcctggcgg

SEQ ID NO: 2027 - DNA, 22 bp, Homo sapiens
catcttttcaccctcctggcgg

SEQ ID NO: 2028 - DNA, 32 bp, Homo sapiens
gcctgtcctctcactccgccttgtcccagccg

SEQ ID NO: 2029 - DNA, 22 bp, Homo sapiens
tcactccgccttgtcccagccg

SEQ ID NO: 2030 - DNA, 35 bp, Homo sapiens
cgccccgagcgctcccaatccacccctgctccggc

SEQ ID NO: 2031 - DNA, 22 bp, Homo sapiens
cgctcccaatccacccctgctc

SEQ ID NO: 2032 - DNA, 25 bp, Homo sapiens
cggcgccaccgagcaatccaaacac

SEQ ID NO: 2033 - DNA, 22 bp, Homo sapiens
cgccaccgagcaatccaaacac

SEQ ID NO: 2034 - DNA, 30 bp, Homo sapiens
gcccctcggcactctcttcatcgctgggca

SEQ ID NO: 2035 - DNA, 22 bp, Homo sapiens
cggcactctcttcatcgctggg

SEQ ID NO: 2036 - DNA, 30 bp, Homo sapiens
cggtctggccgactgctgctggatgctggg

SEQ ID NO: 2037 - DNA, 22 bp, Homo sapiens
gccgactgctgctggatgctgg

SEQ ID NO: 2038 - DNA, 41 bp, Homo sapiens
aaacaacaaaacaaagccaagaagccccaacaaccaccgcg

SEQ ID NO: 2039 - DNA, 22 bp, Homo sapiens
agaagccccaacaaccaccgcg

SEQ ID NO: 2040 - DNA, 41 bp, Homo sapiens
aagtaggaaaagagcgggatgggatgggatgggatgggatg

SEQ ID NO: 2041 - DNA, 22 bp, Homo sapiens
agcgggatgggatgggatggga

SEQ ID NO: 2042 - DNA, 22 bp, Homo sapiens
atgggatgggatgggatgggat

SEQ ID NO: 2043 - DNA, 24 bp, Homo sapiens
atgcgcatcctttccaccggcatg

SEQ ID NO: 2044 - DNA, 22 bp, Homo sapiens
gcgcatcctttccaccggcatg

SEQ ID NO: 2045 - DNA, 38 bp, Homo sapiens
ttgttaagccacttgagccccgggatcgtgttggagtt

SEQ ID NO: 2046 - DNA, 22 bp, Homo sapiens
tgagccccgggatcgtgttgga

SEQ ID NO: 2047 - DNA, 38 bp, Homo sapiens
agctcgctcatgctgaccggctgctcgtcgctctacgt

SEQ ID NO: 2048 - DNA, 22 bp, Homo sapiens
tgctgaccggctgctcgtcgct

SEQ ID NO: 2049 - DNA, 32 bp, Homo sapiens
ttgttggaagtgacgaaggacgccatgccggg

SEQ ID NO: 2050 - DNA, 22 bp, Homo sapiens
tgacgaaggacgccatgccggg

SEQ ID NO: 2051 - DNA, 31 bp, Homo sapiens
ggcttaacagctcttgacgcgggcctgggtg

SEQ ID NO: 2052 - DNA, 22 bp, Homo sapiens
cagctcttgacgcgggcctggg

SEQ ID NO: 2053 - DNA, 36 bp, Homo sapiens
ctttttcctttgtaccgcgtggcattcaagcatagc

SEQ ID NO: 2054 - DNA, 22 bp, Homo sapiens
ccgcgtggcattcaagcatagc

SEQ ID NO: 2055 - DNA, 28 bp, Homo sapiens
cgctctgctgtctccgcttccactccac

SEQ ID NO: 2056 - DNA, 22 bp, Homo sapiens
cgctctgctgtctccgcttcca

SEQ ID NO: 2057 - DNA, 25 bp, Homo sapiens
cttcaacagggcacgctctcgctcc

SEQ ID NO: 2058 - DNA, 22 bp, Homo sapiens
caacagggcacgctctcgctcc

SEQ ID NO: 2059 - DNA, 34 bp, Homo sapiens
ccactgagacatcctgccaccttgtgccccaaca

SEQ ID NO: 2060 - DNA, 22 bp, Homo sapiens
cctgccaccttgtgccccaaca

SEQ ID NO: 2061 - DNA, 27 bp, Homo sapiens
gcgttggcatgcagggctgtctttcca

SEQ ID NO: 2062 - DNA, 22 bp, Homo sapiens
gcgttggcatgcagggctgtct

SEQ ID NO: 2063 - DNA, 43 bp, Homo sapiens
ggacccctgtcttcaagaccagcggcctctgagggtgcgttgg

SEQ ID NO: 2064 - DNA, 22 bp, Homo sapiens
gcggcctctgagggtgcgttgg

SEQ ID NO: 2065 - DNA, 42 bp, Homo sapiens
tttctgttctttcaattgcaggtgccgaaattcagccgccag

SEQ ID NO: 2066 - DNA, 22 bp, Homo sapiens
gcaggtgccgaaattcagccgc

SEQ ID NO: 2067 - DNA, 41 bp, Homo sapiens
caaaggatggaggcccaaccgctcgggagctggctgacgtt

SEQ ID NO: 2068 - DNA, 22 bp, Homo sapiens
ccaaccgctcgggagctggctg

SEQ ID NO: 2069 - DNA, 22 bp, Homo sapiens
ggatggaggcccaaccgctcgg

SEQ ID NO: 2070 - DNA, 36 bp, Homo sapiens
cgcagcaggaaggtccccggctgctggtccttcaac

SEQ ID NO: 2071 - DNA, 22 bp, Homo sapiens
cgcagcaggaaggtccccggct

SEQ ID NO: 2072 - DNA, 22 bp, Homo sapiens
caggaaggtccccggctgctgg

SEQ ID NO: 2073 - DNA, 34 bp, Homo sapiens
gaggaactgtgagctcgtcggcgtggtggtgacc

SEQ ID NO: 2074 - DNA, 35 bp, Homo sapiens
cgcttgcggcacttggaggcggcgatgcggttgcg

SEQ ID NO: 2075 - DNA, 22 bp, Homo sapiens
tggaggcggcgatgcggttgcg

SEQ ID NO: 2076 - DNA, 27 bp, Homo sapiens
tcgatgggcgacaacggcgggctctcg

SEQ ID NO: 2077 - DNA, 22 bp, Homo sapiens
atgggcgacaacggcgggctct

SEQ ID NO: 2078 - DNA, 24 bp, Homo sapiens
gcgctgccgccacctgctcactca

SEQ ID NO: 2079 - DNA, 22 bp, Homo sapiens
cgctgccgccacctgctcactc

SEQ ID NO: 2080 - DNA, 33 bp, Homo sapiens
ggtggcggcggcgggaagggcacaggttcggca

SEQ ID NO: 2081 - DNA, 22 bp, Homo sapiens
cgggaagggcacaggttcggca

SEQ ID NO: 2082 - DNA, 26 bp, Homo sapiens
agggtgtttccatcctccgcctcccc

SEQ ID NO: 2083 - DNA, 22 bp, Homo sapiens
ggtgtttccatcctccgcctcc

SEQ ID NO: 2084 - DNA, 37 bp, Homo sapiens
agctggttctgcttgtgtaaatcctccagggccttga

SEQ ID NO: 2085 - DNA, 22 bp, Homo sapiens
tgtaaatcctccagggccttga

SEQ ID NO: 2086 - DNA, 22 bp, Homo sapiens
ttctgcttgtgtaaatcctcca

SEQ ID NO: 2087 - DNA, 30 bp, Homo sapiens
ccagcccgttggactggatgatgaggcgct

SEQ ID NO: 2088 - DNA, 22 bp, Homo sapiens
cgttggactggatgatgaggcg

SEQ ID NO: 2089 - DNA, 40 bp, Homo sapiens
ctcttgagggtcttcactttctcttccaggcgcgagatgc

SEQ ID NO: 2090 - DNA, 22 bp, Homo sapiens
tcttcactttctcttccaggcg

SEQ ID NO: 2091 - DNA, 44 bp, Homo sapiens
agctggcagccgctgttgacgtggctgaggactttctgcttgag

SEQ ID NO: 2092 - DNA, 22 bp, Homo sapiens
cgtggctgaggactttctgctt

SEQ ID NO: 2093 - DNA, 44 bp, Homo sapiens
gactttactgaaaacagaaaaccgggcgaaccaaggattacaaa

SEQ ID NO: 2094 - DNA, 22 bp, Homo sapiens
cgggcgaaccaaggattacaaa

SEQ ID NO: 2095 - DNA, 39 bp, Homo sapiens
ctgaccagaaaagtagctgccgccaccgccgccctctgg

SEQ ID NO: 2096 - DNA, 22 bp, Homo sapiens
aagtagctgccgccaccgccgc

SEQ ID NO: 2097 - DNA, 33 bp, Homo sapiens
cgcgatagctttcctggcgtcgtttcccccagc

SEQ ID NO: 2098 - DNA, 22 bp, Homo sapiens
gctttcctggcgtcgtttcccc

SEQ ID NO: 2099 - DNA, 25 bp, Homo sapiens
agccctcctgctcctcggtgacgcc

SEQ ID NO: 2100 - DNA, 22 bp, Homo sapiens
gccctcctgctcctcggtgacg

SEQ ID NO: 2101 - DNA, 26 bp, Homo sapiens
ggcgtgtgcccagccgtccaagcgag

SEQ ID NO: 2102 - DNA, 22 bp, Homo sapiens
cgtgtgcccagccgtccaagcg

SEQ ID NO: 2103 - DNA, 26 bp, Homo sapiens
gggtccccttcccaatgtccccgcgg

SEQ ID NO: 2104 - DNA, 22 bp, Homo sapiens
ccccttcccaatgtccccgcgg

SEQ ID NO: 2105 - DNA, 21 bp, Homo sapiens
aggcaaacccacagaggcggc

SEQ ID NO: 2106 - DNA, 22 bp, Homo sapiens
taggcaaacccacagaggcggc

SEQ ID NO: 2107 - DNA, 37 bp, Homo sapiens
aggtacttcgcagggattctgacacgctcccccaccg

SEQ ID NO: 2108 - DNA, 23 bp, Homo sapiens
gattctgacacgctcccccaccg

SEQ ID NO: 2109 - DNA, 31 bp, Homo sapiens
cccttgacggaatcgtgcccctttggtcttg

SEQ ID NO: 2110 - DNA, 22 bp, Homo sapiens
cccttgacggaatcgtgcccct

SEQ ID NO: 2111 - DNA, 36 bp, Homo sapiens
aaatgaaaatcaaatgcggctacttcctgctggtgg

SEQ ID NO: 2112 - DNA, 22 bp, Homo sapiens
tgcggctacttcctgctggtgg

SEQ ID NO: 2113 - DNA, 30 bp, Homo sapiens
cggcccgggtctccacgcagagccacaggg

SEQ ID NO: 2114 - DNA, 22 bp, Homo sapiens
gcccgggtctccacgcagagcc

SEQ ID NO: 2115 - DNA, 23 bp, Homo sapiens
cgctcccccaccgtggcttccac

SEQ ID NO: 2116 - DNA, 22 bp, Homo sapiens
cgctcccccaccgtggcttcca

SEQ ID NO: 2117 - DNA, 27 bp, Homo sapiens
gcttggctgggctcgttggcgcactct

SEQ ID NO: 2118 - DNA, 22 bp, Homo sapiens
gcttggctgggctcgttggcgc

SEQ ID NO: 2119 - DNA, 44 bp, Homo sapiens
acaagtagcctgtcttcagttcccctccattggcccgcttaacg

SEQ ID NO: 2120 - DNA, 22 bp, Homo sapiens
cagttcccctccattggcccgc

SEQ ID NO: 2121 - DNA, 35 bp, Homo sapiens
gataagaggatatttcgtgccgccaggtccctgtg

SEQ ID NO: 2122 - DNA, 22 bp, Homo sapiens
ttcgtgccgccaggtccctgtg

SEQ ID NO: 2123 - DNA, 28 bp, Homo sapiens
atatcccgggccaagccaaagtcacaga

SEQ ID NO: 2124 - DNA, 22 bp, Homo sapiens
cccgggccaagccaaagtcaca

SEQ ID NO: 2125 - DNA, 22 bp, Homo sapiens
ctccccgtgccagcagtccagc

SEQ ID NO: 2126 - DNA, 26 bp, Homo sapiens
cgctcgcccgctccgttcaatccccg

SEQ ID NO: 2127 - DNA, 22 bp, Homo sapiens
cgcccgctccgttcaatccccg

SEQ ID NO: 2128 - DNA, 22 bp, Homo sapiens
gccacccgcagcctcacctcgc

SEQ ID NO: 2129 - DNA, 29 bp, Homo sapiens
ggcagacccaagccaacagcccccagtct

SEQ ID NO: 2130 - DNA, 22 bp, Homo sapiens
gcagacccaagccaacagcccc

SEQ ID NO: 2131 - DNA, 34 bp, Homo sapiens
ctctgtagccatcctcttctcagcccccaccagg

SEQ ID NO: 2132 - DNA, 22 bp, Homo sapiens
gccatcctcttctcagccccca

SEQ ID NO: 2133 - DNA, 36 bp, Homo sapiens
gcgctcccggctgttggtgaacacgcgccgggccac

SEQ ID NO: 2134 - DNA, 20 bp, Homo sapiens
cgctcccggctgttggtgaa

SEQ ID NO: 2135 - DNA, 29 bp, Homo sapiens
ccctcagggcttcgcttccgctcccccag

SEQ ID NO: 2136 - DNA, 22 bp, Homo sapiens
ggcttcgcttccgctcccccag

SEQ ID NO: 2137 - DNA, 40 bp, Homo sapiens
cggccccggtttcctccctctcacccctggcggcgcacgg

SEQ ID NO: 2138 - DNA, 22 bp, Homo sapiens
tctcacccctggcggcgcacgg

SEQ ID NO: 2139 - DNA, 22 bp, Homo sapiens
ctccctctcacccctggcggcg

SEQ ID NO: 2140 - DNA, 25 bp, Homo sapiens
gatcccccgctcccctcttacccca

SEQ ID NO: 2141 - DNA, 22 bp, Homo sapiens
cccccgctcccctcttacccca

SEQ ID NO: 2142 - DNA, 41 bp, Homo sapiens
gggagaagtttcagtaggcaaaggcagatggcggggaggcc

SEQ ID NO: 2143 - DNA, 22 bp, Homo sapiens
gtaggcaaaggcagatggcggg

SEQ ID NO: 2144 - DNA, 37 bp, Homo sapiens
gggaggaggactaggtgccccgctcccacctgcttag

SEQ ID NO: 2145 - DNA, 22 bp, Homo sapiens
tgccccgctcccacctgcttag

SEQ ID NO: 2146 - DNA, 33 bp, Homo sapiens
ggcccccaatccccactgccccccaccccagat

SEQ ID NO: 2147 - DNA, 22 bp, Homo sapiens
ccccaatccccactgcccccca

SEQ ID NO: 2148 - DNA, 27 bp, Homo sapiens
cctgttgggtggcggtggttgtgtggg

SEQ ID NO: 2149 - DNA, 22 bp, Homo sapiens
tgggtggcggtggttgtgtggg

SEQ ID NO: 2150 - DNA, 28 bp, Homo sapiens
cgcagcagccgcaccaggaagccgatgt

SEQ ID NO: 2151 - DNA, 22 bp, Homo sapiens
cagcagccgcaccaggaagccg

SEQ ID NO: 2152 - DNA, 26 bp, Homo sapiens
ggacccccgagaccttgcccctgacg

SEQ ID NO: 2153 - DNA, 22 bp, Homo sapiens
ccccgagaccttgcccctgacg

SEQ ID NO: 2154 - DNA, 37 bp, Homo sapiens
gggcggtgagaaaagcgaagcctccccagcccctcct

SEQ ID NO: 2155 - DNA, 22 bp, Homo sapiens
gcgaagcctccccagcccctcc

SEQ ID NO: 2156 - DNA, 29 bp, Homo sapiens
ccgtgaccctgggcccccacctcctctcc

SEQ ID NO: 2157 - DNA, 22 bp, Homo sapiens
ccgtgaccctgggcccccacct

SEQ ID NO: 2158 - DNA, 24 bp, Homo sapiens
cggtcgggcgggtgcgtcggcagc

SEQ ID NO: 2159 - DNA, 22 bp, Homo sapiens
cggtcgggcgggtgcgtcggca

SEQ ID NO: 2160 - DNA, 24 bp, Homo sapiens
catcttgatgggccgggccgctcc

SEQ ID NO: 2161 - DNA, 22 bp, Homo sapiens
tcttgatgggccgggccgctcc

SEQ ID NO: 2162 - DNA, 33 bp, Homo sapiens
cccctcctggcctccccccgcgaccccagcccg

SEQ ID NO: 2163 - DNA, 22 bp, Homo sapiens
cctggcctccccccgcgacccc

SEQ ID NO: 2164 - DNA, 23 bp, Homo sapiens
ggaccaacccccactgcccacgg

SEQ ID NO: 2165 - DNA, 22 bp, Homo sapiens
ggaccaacccccactgcccacg

SEQ ID NO: 2166 - DNA, 30 bp, Homo sapiens
gatgttcatccgaaccgccgccgccattct

SEQ ID NO: 2167 - DNA, 22 bp, Homo sapiens
tcatccgaaccgccgccgccat

SEQ ID NO: 2168 - DNA, 40 bp, Homo sapiens
accatgttcagcttctctctcccgccgctccagatagtcg

SEQ ID NO: 2169 - DNA, 22 bp, Homo sapiens
ctcccgccgctccagatagtcg

SEQ ID NO: 2170 - DNA, 23 bp, Homo sapiens
gcacaagcgaagatgagcccgtc

SEQ ID NO: 2171 - DNA, 22 bp, Homo sapiens
gcacaagcgaagatgagcccgt

SEQ ID NO: 2172 - DNA, 25 bp, Homo sapiens
gcaccagccccttcaacttctccag

SEQ ID NO: 2173 - DNA, 22 bp, Homo sapiens
ccagccccttcaacttctccag

SEQ ID NO: 2174 - DNA, 32 bp, Homo sapiens
tgcctcttcaggtgtcgctgctctcgctgaag

SEQ ID NO: 2175 - DNA, 22 bp, Homo sapiens
ggtgtcgctgctctcgctgaag

SEQ ID NO: 2176 - DNA, 29 bp, Homo sapiens
tcagagtcgctcacactgctgctgctcca

SEQ ID NO: 2177 - DNA, 22 bp, Homo sapiens
cgctcacactgctgctgctcca

SEQ ID NO: 2178 - DNA, 25 bp, Homo sapiens
ctggaatagccctcatcactgccga

SEQ ID NO: 2179 - DNA, 22 bp, Homo sapiens
ggaatagccctcatcactgccg

SEQ ID NO: 2180 - DNA, 22 bp, Homo sapiens
gctggcgggcgggcaggcggca

SEQ ID NO: 2181 - DNA, 29 bp, Homo sapiens
tagccttcaggatggagtggaggtgcggg

SEQ ID NO: 2182 - DNA, 22 bp, Homo sapiens
caggatggagtggaggtgcggg

SEQ ID NO: 2183 - DNA, 30 bp, Homo sapiens
ctcctgcagctccttgaccatctgctcgta

SEQ ID NO: 2184 - DNA, 22 bp, Homo sapiens
gctccttgaccatctgctcgta

SEQ ID NO: 2185 - DNA, 32 bp, Homo sapiens
ctggaagttgaggaaagccaggtctcccttca

SEQ ID NO: 2186 - DNA, 22 bp, Homo sapiens
ggaagttgaggaaagccaggtc

SEQ ID NO: 2187 - DNA, 28 bp, Homo sapiens
ccaagtggagtggagtctgctgcaggtt

SEQ ID NO: 2188 - DNA, 22 bp, Homo sapiens
caagtggagtggagtctgctgc

SEQ ID NO: 2189 - DNA, 36 bp, Homo sapiens
ggacaccaaaagctccacgatgcccaggtagccatg

SEQ ID NO: 2190 - DNA, 22 bp, Homo sapiens
ctccacgatgcccaggtagcca

SEQ ID NO: 2191 - DNA, 34 bp, Homo sapiens
agcattgacatcagcacccaaggacaccaaaagc

SEQ ID NO: 2192 - DNA, 22 bp, Homo sapiens
catcagcacccaaggacaccaa

SEQ ID NO: 2193 - DNA, 30 bp, Homo sapiens
gttgacatcagccccacacttcaacaggag

SEQ ID NO: 2194 - DNA, 22 bp, Homo sapiens
tcagccccacacttcaacagga

SEQ ID NO: 2195 - DNA, 32 bp, Homo sapiens
gtcatagctctcctcatcctcactctctggca

SEQ ID NO: 2196 - DNA, 22 bp, Homo sapiens
tcctcatcctcactctctggca

SEQ ID NO: 2197 - DNA, 34 bp, Homo sapiens
agggcagctcgtcctctgtgaactccgtgaactc

SEQ ID NO: 2198 - DNA, 22 bp, Homo sapiens
gctcgtcctctgtgaactccgt

SEQ ID NO: 2199 - DNA, 37 bp, Homo sapiens
acgctggcctccaaacacacagtcatcatagggcagc

SEQ ID NO: 2200 - DNA, 22 bp, Homo sapiens
gcctccaaacacacagtcatca

SEQ ID NO: 2201 - DNA, 32 bp, Homo sapiens
aagttcacaaaagcaacaaaatgagggctgat

SEQ ID NO: 2202 - DNA, 22 bp, Homo sapiens
acaaaagcaacaaaatgagggc

SEQ ID NO: 2203 - DNA, 31 bp, Homo sapiens
ttgataaccttctccaaaaaccccacaaagg

SEQ ID NO: 2204 - DNA, 22 bp, Homo sapiens
ttctccaaaaaccccacaaagg

SEQ ID NO: 2205 - DNA, 31 bp, Homo sapiens
tctgtgactgcgacgagagcgagcagagagc

SEQ ID NO: 2206 - DNA, 22 bp, Homo sapiens
gcgagcagagcgagcagagagc

SEQ ID NO: 2207 - DNA, 36 bp, Homo sapiens
ccttcaaagtcaatccaatagcagcccgaagatgtc

SEQ ID NO: 2208 - DNA, 22 bp, Homo sapiens
caatccaatagcagcccgaaga

SEQ ID NO: 2209 - DNA, 43 bp, Homo sapiens
acctgattcaaacatgcagccacggcgacccacacagaacctt

SEQ ID NO: 2210 - DNA, 22 bp, Homo sapiens
ccacggcgacccacacagaacc

SEQ ID NO: 2211 - DNA, 38 bp, Homo sapiens
ctgaatcttttttctccccatagtccccgtttttcttc

SEQ ID NO: 2212 - DNA, 22 bp, Homo sapiens
ttttttctccccatagtccccg

SEQ ID NO: 2213 - DNA, 33 bp, Homo sapiens
ccaaactgttgtggctggacactgggatggaga

SEQ ID NO: 2214 - DNA, 22 bp, Homo sapiens
tggctggacactgggatggaga

SEQ ID NO: 2215 - DNA, 25 bp, Homo sapiens
gggattgccatacccgttccctgca

SEQ ID NO: 2216 - DNA, 22 bp, Homo sapiens
gattgccatacccgttccctgc

SEQ ID NO: 2217 - DNA, 38 bp, Homo sapiens
gcatcgtattcttgctgcctggtggaataagaactcgg

SEQ ID NO: 2218 - DNA, 22 bp, Homo sapiens
cgtattcttgctgcctggtgga

SEQ ID NO: 2219 - DNA, 22 bp, Homo sapiens
gcctggtggaataagaactcgg

SEQ ID NO: 2220 - DNA, 22 bp, Homo sapiens
gggtagccactgactgagccga

SEQ ID NO: 2221 - DNA, 35 bp, Homo sapiens
cctgccgtggaagccccgtggagagactggagcgt

SEQ ID NO: 2222 - DNA, 22 bp, Homo sapiens
cctgccgtggaagccccgtgga

SEQ ID NO: 2223 - DNA, 40 bp, Homo sapiens
gcattatgatgagcccgtttgtcagccgcagattgaaacc

SEQ ID NO: 2224 - DNA, 22 bp, Homo sapiens
tgagcccgtttgtcagccgcag

SEQ ID NO: 2225 - DNA, 35 bp, Homo sapiens
tcagttactcaggccccaagaagcaggaccaagcc

SEQ ID NO: 2226 - DNA, 22 bp, Homo sapiens
caggccccaagaagcaggacca

SEQ ID NO: 2227 - DNA, 40 bp, Homo sapiens
agtaaccaacccactgacaccacccactgcccatcccttg

SEQ ID NO: 2228 - DNA, 22 bp, Homo sapiens
gacaccacccactgcccatccc

SEQ ID NO: 2229 - DNA, 36 bp, Homo sapiens
tacaaaacctctatgccacccaaaacaccctccctg

SEQ ID NO: 2230 - DNA, 22 bp, Homo sapiens
tgccacccaaaacaccctccct

SEQ ID NO: 2231 - DNA, 31 bp, Homo sapiens
gccaaacattgccagtcgccgccgccgcctg

SEQ ID NO: 2232 - DNA, 22 bp, Homo sapiens
ttgccagtcgccgccgccgcct

SEQ ID NO: 2233 - DNA, 34 bp, Homo sapiens
ctccttctccgtagccaaaagtcgccctcccggg

SEQ ID NO: 2234 - DNA, 24 bp, Homo sapiens
ccgtagccaaaagtcgccctcccg

SEQ ID NO: 2235 - DNA, 42 bp, Homo sapiens
ccaatcaccgcgccggcctcccctccccctatctctcgccgg

SEQ ID NO: 2236 - DNA, 23 bp, Homo sapiens
cccctccccctatctctcgccgg

SEQ ID NO: 2237 - DNA, 22 bp, Homo sapiens
gcgccggcctcccctcccccta

SEQ ID NO: 2238 - DNA, 22 bp, Homo sapiens
ccaatcaccgcgccggcctccc

SEQ ID NO: 2239 - DNA, 34 bp, Homo sapiens
cgcgcgaccctccgggagtctggcgtgagggtgg

SEQ ID NO: 2240 - DNA, 23 bp, Homo sapiens
ccgggagtctggcgtgagggtgg

SEQ ID NO: 2241 - DNA, 22 bp, Homo sapiens
cgcgcgaccctccgggagtctg

SEQ ID NO: 2242 - DNA, 34 bp, Homo sapiens
ttattaccagattccccgaccaactccagcagcg

SEQ ID NO: 2243 - DNA, 22 bp, Homo sapiens
tccccgaccaactccagcagcg

SEQ ID NO: 2244 - DNA, 46 bp, Homo sapiens
ctcgtcctcctcctcctctgctggcggcggcgtcgagggtagtgac

SEQ ID NO: 2245 - DNA, 22 bp, Homo sapiens
tgctggcggcggcgtcgagggt

SEQ ID NO: 2246 - DNA, 22 bp, Homo sapiens
tcctcctctgctggcggcggcg

SEQ ID NO: 2247 - DNA, 31 bp, Homo sapiens
cgctgcacgccatccccaacccgtcgtaagg

SEQ ID NO: 2248 - DNA, 23 bp, Homo sapiens
cgctgcacgccatccccaacccg

SEQ ID NO: 2249 - DNA, 40 bp, Homo sapiens
accttatggctctgagatgggcaggcagggcagttcttcc

SEQ ID NO: 2250 - DNA, 23 bp, Homo sapiens
tgggcaggcagggcagttcttcc

SEQ ID NO: 2251 - DNA, 23 bp, Homo sapiens
gctctgagatgggcaggcagggc

SEQ ID NO: 2252 - DNA, 32 bp, Homo sapiens
tgtcctaagccctcactgccccaagcccaaaa

SEQ ID NO: 2253 - DNA, 23 bp, Homo sapiens
gccctcactgccccaagcccaaa

SEQ ID NO: 2254 - DNA, 24 bp, Homo sapiens
ggaagaccccgactccttactgga

SEQ ID NO: 2255 - DNA, 31 bp, Homo sapiens
cccccaagccggcccccccacagtagaggtt

SEQ ID NO: 2256 - DNA, 22 bp, Homo sapiens
gccggcccccccacagtagagg

SEQ ID NO: 2257 - DNA, 23 bp, Homo sapiens
cccccaagccggcccccccacac

SEQ ID NO: 2258 - DNA, 35 bp, Homo sapiens
agctcctcttcgggcgacatgatggcgtcagcggc

SEQ ID NO: 2259 - DNA, 23 bp, Homo sapiens
cgggcgacatgatggcgtcagcg

SEQ ID NO: 2260 - DNA, 22 bp, Homo sapiens
gcaggacagccggccgcttccc

SEQ ID NO: 2261 - DNA, 22 bp, Homo sapiens
gcaggacagccggccgcttccc

SEQ ID NO: 2262 - DNA, 35 bp, Homo sapiens
ctgcccattggctttgtgtccttggcgccggtggc

SEQ ID NO: 2263 - DNA, 22 bp, Homo sapiens
ttgtgtccttggcgccggtggc

SEQ ID NO: 2264 - DNA, 22 bp, Homo sapiens
ggctttgtgtccttggcgccgg

SEQ ID NO: 2265 - DNA, 38 bp, Homo sapiens
agttcttcttctttgctcctccattgcggtccccttca

SEQ ID NO: 2266 - DNA, 20 bp, Homo sapiens
gctcctccattgcggtcccc

SEQ ID NO: 2267 - DNA, 22 bp, Homo sapiens
gctcctccattgcggtcccctt

SEQ ID NO: 2268 - DNA, 25 bp, Homo sapiens
tctttgctcctccattgcggtcccc

SEQ ID NO: 2269 - DNA, 23 bp, Homo sapiens
tttgctcctccattgcggtcccc

SEQ ID NO: 2270 - DNA, 18 bp, Homo sapiens
tcctccattgcggtcccc

SEQ ID NO: 2271 - DNA, 25 bp, Homo sapiens
gctactcgaatgagctcaggcttcc

SEQ ID NO: 2272 - DNA, 20 bp, Homo sapiens
tcgaatgagctcaggcttcc

SEQ ID NO: 2273 - DNA, 18 bp, Homo sapiens
tcgaatgagctcaggctt

SEQ ID NO: 2274 - DNA, 22 bp, Homo sapiens
actcgaatgagctcaggcttcc

SEQ ID NO: 2275 - DNA, 23 bp, Homo sapiens
agctcccagctttgcgtgcccct

SEQ ID NO: 2276 - DNA, 20 bp, Homo sapiens
gctcccagctttgcgtgccc

SEQ ID NO: 2277 - DNA, 24 bp, Homo sapiens
tgcgcgctccgggcaacatggtcc

SEQ ID NO: 2278 - DNA, 20 bp, Homo sapiens
gcgcgctccgggcaacatgg

SEQ ID NO: 2279 - DNA, 22 bp, Homo sapiens
cgcgctccgggcaacatggtcc

SEQ ID NO: 2280 - DNA, 18 bp, Homo sapiens
cgcgctccgggcaacatg

SEQ ID NO: 2281 - DNA, 18 bp, Homo sapiens
ctccgggcaacatggtcc

SEQ ID NO: 2282 - DNA, 24 bp, Homo sapiens
ggcctcctttgctgccctcacgat

SEQ ID NO: 2283 - DNA, 22 bp, Homo sapiens
gcctcctttgctgccctcacga

SEQ ID NO: 2284 - DNA, 39 bp, Homo sapiens
gccaaggggcgggatgatgatggcggcgatgggcgtggc

SEQ ID NO: 2285 - DNA, 20 bp, Homo sapiens
gcgggatgatgatggcggcg

SEQ ID NO: 2286 - DNA, 70 bp, Homo sapiens
cccgggccaggctcacgcgctgcttctggcccccagacaggttcacgcccttctcgccaatctctgtccg

SEQ ID NO: 2287 - DNA, 20 bp, Homo sapiens
gggccaggctcacgcgctgc

SEQ ID NO: 2288 - DNA, 45 bp, Homo sapiens
gcaactttaagatctgcggcccggaaaacatcatcaggtcgtgga

SEQ ID NO: 2289 - DNA, 20 bp, Homo sapiens
ctgcggcccggaaaacatca

SEQ ID NO: 2290 - DNA, 92 bp, Homo sapiens
atgccattctccatttgctttgcttccttccctggaccgctgacgcccgtgaccccgttctcctctgcatcctgctcctcgtctgtgctggc

SEQ ID NO: 2291 - DNA, 20 bp, Homo sapiens
ccctggaccgctgacgcccg

SEQ ID NO: 2292 - DNA, 26 bp, Homo sapiens
gccggtgggcgatggtgagacggtgc

SEQ ID NO: 2293 - DNA, 22 bp, Homo sapiens
ccggtgggcgatggtgaggacg

SEQ ID NO: 2294 - DNA, 26 bp, Homo sapiens
aagccatgacttctctgccctacgta

SEQ ID NO: 2295 - DNA, 22 bp, Homo sapiens
catgacttctctgccctacgta

SEQ ID NO: 2296 - DNA, 39 bp, Homo sapiens
gaggcacagcgggcgactccttgggcggcttcttgtcgg

SEQ ID NO: 2297 - DNA, 21 bp, Homo sapiens
cgggcgactccttgggcggct

SEQ ID NO: 2298 - DNA, 26 bp, Homo sapiens
cacgggcgggatgggaagcacaggtc

SEQ ID NO: 2299 - DNA, 21 bp, Homo sapiens
gcgggatgggaagcacaggtc

SEQ ID NO: 2300 - DNA, 34 bp, Homo sapiens
gaggcacagcgggcgactccttgggcggcttctt

SEQ ID NO: 2301 - DNA, 22 bp, Homo sapiens
cgggcgactccttgggcggctt

SEQ ID NO: 2302 - DNA, 35 bp, Homo sapiens
aaaaatatgtgtgggcgtgggcgggagataggaac

SEQ ID NO: 2303 - DNA, 22 bp, Homo sapiens
tgtgtgggcgtgggcgggagat

SEQ ID NO: 2304 - DNA, 46 bp, Homo sapiens
gagccaggtcctagggagggagcaggcggaggagcagacggagctg

SEQ ID NO: 2305 - DNA, 23 bp, Homo sapiens
gcaggcggaggagcagacggagc

SEQ ID NO: 2306 - DNA, 23 bp, Homo sapiens
ggtcctagggagggagcaggcgg

SEQ ID NO: 2307 - DNA, 32 bp, Homo sapiens
aggcccatctcctcctccccctgcagtagtgc

SEQ ID NO: 2308 - DNA, 23 bp, Homo sapiens
ggcccatctcctcctccccctgg

SEQ ID NO: 2309 - DNA, 36 bp, Homo sapiens
aaatgaaaacgtaatgacttgtctccgcggctcccg

SEQ ID NO: 2310 - DNA, 22 bp, Homo sapiens
tgacttgtctccgcggctcccg

SEQ ID NO: 2311 - DNA, 36 bp, Homo sapiens
tggtgaaattgtgctgaggtcctggccctgggtcgt

SEQ ID NO: 2312 - DNA, 23 bp, Homo sapiens
gctgaggtcctggccctgggtcg

SEQ ID NO: 2313 - DNA, 43 bp, Homo sapiens
gggctgaagagaaagtctgcgctgggagctgcaggctgggccc

SEQ ID NO: 2314 - DNA, 22 bp, Homo sapiens
cgctgggagctgcaggctgggc

SEQ ID NO: 2315 - DNA, 23 bp, Homo sapiens
gaaagtctgcgctgggagctgca

SEQ ID NO: 2316 - DNA, 48 bp, Homo sapiens
ctgcccgatccacaaagaccccagtgcaagcgatgggcagcatcagat

SEQ ID NO: 2317 - DNA, 22 bp, Homo sapiens
ccagtgcaagcgatgggcagca

SEQ ID NO: 2318 - DNA, 25 bp, Homo sapiens
tccacaaagaccccagtgcaagcga

SEQ ID NO: 2319 - DNA, 43 bp, Homo sapiens
ggaaaattcactgcgatctgcaagccctggcaaccaaccgaga

SEQ ID NO: 2320 - DNA, 22 bp, Homo sapiens
tgcaagccctggcaaccaaccg

SEQ ID NO: 2321 - DNA, 25 bp, Homo sapiens
tcactgcgatctgcaagccctggca

SEQ ID NO: 2322 - DNA, 36 bp, Homo sapiens
ggtaatgccacagcaccctccaccagcccagcctga

SEQ ID NO: 2323 - DNA, 22 bp, Homo sapiens
gcaccctccaccagcccagcct

SEQ ID NO: 2324 - DNA, 53 bp, Homo sapiens
tagcacatctggcccccaccagcctccccttctccttccccagccctggcctc

SEQ ID NO: 2325 - DNA, 22 bp, Homo sapiens
ttctccttccccagccctggcc

SEQ ID NO: 2326 - DNA, 22 bp, Homo sapiens
gcccccaccagcctccccttct

SEQ ID NO: 2327 - DNA, 26 bp, Homo sapiens
gccccgcccttgccattcttttccct

SEQ ID NO: 2328 - DNA, 22 bp, Homo sapiens
gccccgcccttgccattctttt

SEQ ID NO: 2329 - DNA, 37 bp, Homo sapiens
catatccctcagtccccaacccacgcccccagagtct

SEQ ID NO: 2330 - DNA, 22 bp, Homo sapiens
cagtccccaacccacgccccca

SEQ ID NO: 2331 - DNA, 40 bp, Homo sapiens
tctgacctatttataccccagccaggccctgcccatagca

SEQ ID NO: 2332 - DNA, 22 bp, Homo sapiens
accccagccaggccctgcccat

SEQ ID NO: 2333 - DNA, 40 bp, Homo sapiens
ttcctttgcttcctgctcccgagtgcgcaacccagcaaac

SEQ ID NO: 2334 - DNA, 22 bp, Homo sapiens
gctcccgagtgcgcaacccagc

SEQ ID NO: 2335 - DNA, 42 bp, Homo sapiens
tgcagaggccatgcaccttctcgagctgggctgctgcgtgca

SEQ ID NO: 2336 - DNA, 22 bp, Homo sapiens
tcgagctgggctgctgcgtgca

SEQ ID NO: 2337 - DNA, 38 bp, Homo sapiens
gttcaatgtgtttccaccccaggcagccacccactgat

SEQ ID NO: 2338 - DNA, 22 bp, Homo sapiens
ttccaccccaggcagccaccca

SEQ ID NO: 2339 - DNA, 42 bp, Homo sapiens
atggcaagagtcagacagtcccggtccggatggcagttgtgt

SEQ ID NO: 2340 - DNA, 22 bp, Homo sapiens
cccggtccggatggcagttgtg

SEQ ID NO: 2341 - DNA, 26 bp, Homo sapiens
accggtcgggtgagagtggcagggtc

SEQ ID NO: 2342 - DNA, 23 bp, Homo sapiens
ccggtcgggtgagagtggcaggg

SEQ ID NO: 2343 - DNA, 27 bp, Homo sapiens
aaaataaagtcgttgtgggcggctggg

SEQ ID NO: 2344 - DNA, 20 bp, Homo sapiens
agtcgttgtgggcggctggg

SEQ ID NO: 2345 - DNA, 25 bp, Homo sapiens
gcaggtatgggagatgccggccggg

SEQ ID NO: 2346 - DNA, 22 bp, Homo sapiens
ggtatgggagatgccggccggg

SEQ ID NO: 2347 - DNA, 23 bp, Homo sapiens
agcagcagcagctccgccacgcg

SEQ ID NO: 2348 - DNA, 22 bp, Homo sapiens
gcagcagcagctccgccacgcg

SEQ ID NO: 2349 - DNA, 25 bp, Homo sapiens
tccgcgccgtggagcagcagcagct

SEQ ID NO: 2350 - DNA, 22 bp, Homo sapiens
ccgcgccgtggagcagcagcag

SEQ ID NO: 2351 - DNA, 31 bp, Homo sapiens
ccctcccgggcagcatcatgcaccggtcggg

SEQ ID NO: 2352 - DNA, 24 bp, Homo sapiens
gggcagcatcatgcaccggtcggg

SEQ ID NO: 2353 - DNA, 22 bp, Homo sapiens
ccctcccgggcagcatcatgca

SEQ ID NO: 2354 - DNA, 26 bp, Homo sapiens
cgcgccccggcccggtgcagcaccac

SEQ ID NO: 2355 - DNA, 21 bp, Homo sapiens
gcgccccggcccggtgcagca

SEQ ID NO: 2356 - DNA, 27 bp, Homo sapiens
accccaggcatcgcgcacgtccagccg

SEQ ID NO: 2357 - DNA, 22 bp, Homo sapiens
aggcatcgcgcacgtccagccg

SEQ ID NO: 2358 - DNA, 29 bp, Homo sapiens
caggtaccctgcaacgtcgcggtggcccc

SEQ ID NO: 2359 - DNA, 22 bp, Homo sapiens
cctgcaacgtcgcggtggcccc

SEQ ID NO: 2360 - DNA, 41 bp, Homo sapiens
ggaacctggcgtcagtcccccgtggctgtgcgcaggtaccc

SEQ ID NO: 2361 - DNA, 21 bp, Homo sapiens
tcccccgtggctgtgcgcagg

SEQ ID NO: 2362 - DNA, 41 bp, Homo sapiens
aggcctcttggagaccttacccctggctgtttggactttgt

SEQ ID NO: 2363 - DNA, 22 bp, Homo sapiens
ttggagaccttacccctggctg

SEQ ID NO: 2364 - DNA, 27 bp, Homo sapiens
gggcctctccgcactcccttaccctgg

SEQ ID NO: 2365 - DNA, 22 bp, Homo sapiens
gcctctccgcactcccttaccc

SEQ ID NO: 2366 - DNA, 44 bp, Homo sapiens
gcagtgctggtgttgctcgtcccgctgctgtgtttctgtgcccg

SEQ ID NO: 2367 - DNA, 22 bp, Homo sapiens
ggtgttgctcgtcccgctgctg

SEQ ID NO: 2368 - DNA, 31 bp, Homo sapiens
aaccctcgtcactcccaatactcggcaggct

SEQ ID NO: 2369 - DNA, 22 bp, Homo sapiens
tcactcccaatactcggcaggc

SEQ ID NO: 2370 - DNA, 31 bp, Homo sapiens
cctaagggcagcaggatggagaggtggcagc

SEQ ID NO: 2371 - DNA, 22 bp, Homo sapiens
ggcagcaggatggagaggtggc

SEQ ID NO: 2372 - DNA, 28 bp, Homo sapiens
tggcccccccaatccatactcataggcc

SEQ ID NO: 2373 - DNA, 23 bp, Homo sapiens
ggcccccccaatccatactcata

SEQ ID NO: 2374 - DNA, 27 bp, Homo sapiens
tctgacccacgcagacaaagaggcaca

SEQ ID NO: 2375 - DNA, 22 bp, Homo sapiens
cccacgcagacaaagaggcaca

SEQ ID NO: 2376 - DNA, 34 bp, Homo sapiens
cgtcagacgctgggtgaaggaggaggcaccagca

SEQ ID NO: 2377 - DNA, 22 bp, Homo sapiens
acgctgggtgaaggaggaggca

SEQ ID NO: 2378 - DNA, 48 bp, Homo sapiens
aaaatgatggtctcagcaaatgcagggaagtgggtgggtctcggaggc

SEQ ID NO: 2379 - DNA, 22 bp, Homo sapiens
gcagggaagtgggtgggtctcg

SEQ ID NO: 2380 - DNA, 31 bp, Homo sapiens
aaaatcgtttttggaagggctgtagggcaag

SEQ ID NO: 2381 - DNA, 22 bp, Homo sapiens
tttttggaagggctgtagggca

SEQ ID NO: 2382 - DNA, 49 bp, Homo sapiens
cagggacctgaaactgaccaaagaggcagacggaggcgacaatgcaggg

SEQ ID NO: 2383 - DNA, 22 bp, Homo sapiens
ccaaagaggcagacggaggcga

SEQ ID NO: 2384 - DNA, 42 bp, Homo sapiens
gggcttacactacctggacctgcggagatgctgcctagctgc

SEQ ID NO: 2385 - DNA, 22 bp, Homo sapiens
tggacctgcggagatgctgcct

SEQ ID NO: 2386 - DNA, 47 bp, Homo sapiens
ccacatacatcgcaacggccgcccctaaccaccccgcccccagtgct

SEQ ID NO: 2387 - DNA, 22 bp, Homo sapiens
gccgcccctaaccaccccgccc

SEQ ID NO: 2388 - DNA, 28 bp, Homo sapiens
cactctccgatgctcttccaggcgcgcg

SEQ ID NO: 2389 - DNA, 22 bp, Homo sapiens
ctctccgatgctcttccaggcg

SEQ ID NO: 2390 - DNA, 22 bp, Homo sapiens
ccgatgctcttccaggcgcgcg

SEQ ID NO: 2391 - DNA, 27 bp, Homo sapiens
actcaccgcagtggtagggcttttcgc

SEQ ID NO: 2392 - DNA, 22 bp, Homo sapiens
ccgcagtggtagggcttttcgc

SEQ ID NO: 2393 - DNA, 40 bp, Homo sapiens
cgtgtggatgcgccggtgctgggtgaggttggcgtgctgc

SEQ ID NO: 2394 - DNA, 22 bp, Homo sapiens
cggtgctgggtgaggttggcgt

SEQ ID NO: 2395 - DNA, 33 bp, Homo sapiens
gaagggcttctctcgtcggtgggtgcgcagatg

SEQ ID NO: 2396 - DNA, 22 bp, Homo sapiens
gcttctctcgtcggtgggtgcg

SEQ ID NO: 2397 - DNA, 42 bp, Homo sapiens
cttcctttactgcattattccccaggcggtgtgcagtctgtg

SEQ ID NO: 2398 - DNA, 22 bp, Homo sapiens
tccccaggcggtgtgcagtctg

SEQ ID NO: 2399 - DNA, 52 bp, Homo sapiens
ggcctgagtggatgtattcgttgcggctcgtgcttctgaggacggccaggcc

SEQ ID NO: 2400 - DNA, 22 bp, Homo sapiens
tgcttctgaggacggccaggcc

SEQ ID NO: 2401 - DNA, 24 bp, Homo sapiens
gcggctcgtgcttctgaggacggc

SEQ ID NO: 2402 - DNA, 35 bp, Homo sapiens
gggctgtcttcgggcggctcctccagcttctccct

SEQ ID NO: 2403 - DNA, 22 bp, Homo sapiens
ggcggctcctccagcttctccc

SEQ ID NO: 2404 - DNA, 22 bp, Homo sapiens
gggctgtcttcgggcggctcct

SEQ ID NO: 2405 - DNA, 31 bp, Homo sapiens
gggagggctgggctgttgagggcgatggagc

SEQ ID NO: 2406 - DNA, 22 bp, Homo sapiens
agggctgggctgttgagggcga

SEQ ID NO: 2407 - DNA, 31 bp, Homo sapiens
atttggtgtctgtgcggtgaagaaggctggg

SEQ ID NO: 2408 - DNA, 22 bp, Homo sapiens
ctgtgcggtgaagaaggctggg

SEQ ID NO: 2409 - DNA, 27 bp, Homo sapiens
gaagttggagcagtcaggccgagccgg

SEQ ID NO: 2410 - DNA, 22 bp, Homo sapiens
tggagcagtcaggccgagccgg

SEQ ID NO: 2411 - DNA, 31 bp, Homo sapiens
gggaatttctaggaggacccgggcgaaagcc

SEQ ID NO: 2412 - DNA, 22 bp, Homo sapiens
ctaggaggacccgggcgaaagc

SEQ ID NO: 2413 - DNA, 30 bp, Homo sapiens
gcctcgcggccctccggagacaccttgcag

SEQ ID NO: 2414 - DNA, 22 bp, Homo sapiens
gcctcgcggccctccggagaca

SEQ ID NO: 2415 - DNA, 30 bp, Homo sapiens
ggacgccgccgcagcctctgacgtggaagg

SEQ ID NO: 2416 - DNA, 22 bp, Homo sapiens
cgccgccgcagcctctgacgtg

SEQ ID NO: 2417 - DNA, 43 bp, Homo sapiens
attaaagaggagatcttggccgagacggacgaggccaggaagg

SEQ ID NO: 2418 - DNA, 22 bp, Homo sapiens
ccgagacggacgaggccaggaa

SEQ ID NO: 2419 - DNA, 22 bp, Homo sapiens
atcttggccgagacggacgagg

SEQ ID NO: 2420 - DNA, 29 bp, Homo sapiens
tccagggaatcggagtcatggcaggcggc

SEQ ID NO: 2421 - DNA, 22 bp, Homo sapiens
aatcggagtcatggcaggcggc

SEQ ID NO: 2422 - DNA, 33 bp, Homo sapiens
cccttgcagcctggcaggactcagcggagcaac

SEQ ID NO: 2423 - DNA, 22 bp, Homo sapiens
gcagcctggcaggactcagcgg

SEQ ID NO: 2424 - DNA, 33 bp, Homo sapiens
gggaactggaacagcgtgcttggcccttgcagc

SEQ ID NO: 2425 - DNA, 22 bp, Homo sapiens
cagcgtgcttggcccttgcagc

SEQ ID NO: 2426 - DNA, 36 bp, Homo sapiens
gggagtggagcagcgggcggaggcacaggagaagtg

SEQ ID NO: 2427 - DNA, 22 bp, Homo sapiens
tggagcagcgggcggaggcaca

SEQ ID NO: 2428 - DNA, 46 bp, Homo sapiens
gcgcgggccccaaagtttctcctctcccgaagaccgcagccgcagg

SEQ ID NO: 2429 - DNA, 22 bp, Homo sapiens
tcccgaagaccgcagccgcagg

SEQ ID NO: 2430 - DNA, 28 bp, Homo sapiens
gggacgcgggtctggaggagcgggcacc

SEQ ID NO: 2431 - DNA, 22 bp, Homo sapiens
gcgggtctggaggagcgggcac

SEQ ID NO: 2432 - DNA, 22 bp, Homo sapiens
gccgcccttcctgatgtgctgg

SEQ ID NO: 2433 - DNA, 30 bp, Homo sapiens
ccagtccagggcgggcagggtcgggctcat

SEQ ID NO: 2434 - DNA, 22 bp, Homo sapiens
tccagggcgggcagggtcgggc

SEQ ID NO: 2435 - DNA, 47 bp, Homo sapiens
ggctgccctccgtctcgtagtgggctcggtggtgggacttgggctgc

SEQ ID NO: 2436 - DNA, 22 bp, Homo sapiens
ggctcggtggtgggacttgggc

SEQ ID NO: 2437 - DNA, 29 bp, Homo sapiens
ggtcgtccgccgtcccaatgaaaagctgc

SEQ ID NO: 2438 - DNA, 22 bp, Homo sapiens
ggtcgtccgccgtcccaatgaa

SEQ ID NO: 2439 - DNA, 26 bp, Homo sapiens
gaccatcttcttcccgcccacgaccg

SEQ ID NO: 2440 - DNA, 22 bp, Homo sapiens
atcttcttcccgcccacgaccg

SEQ ID NO: 2441 - DNA, 33 bp, Homo sapiens
agtatgcaacccccgccccccacccccaacagg

SEQ ID NO: 2442 - DNA, 19 bp, Homo sapiens
gccccccacccccaacagg

SEQ ID NO: 2443 - DNA, 36 bp, Homo sapiens
ggtccccttcccagtcccgtgcgcggctctgactcg

SEQ ID NO: 2444 - DNA, 22 bp, Homo sapiens
ccttcccagtcccgtgcgcggc

SEQ ID NO: 2445 - DNA, 22 bp, Homo sapiens
tcccgtgcgcggctctgactcg

SEQ ID NO: 2446 - DNA, 48 bp, Homo sapiens
ctctgagctgtcgccgctgcgtcgctgctgctgctgccgccgctgccg

SEQ ID NO: 2447 - DNA, 22 bp, Homo sapiens
gctgctgctgccgccgctgccg

SEQ ID NO: 2448 - DNA, 22 bp, Homo sapiens
cgccgctgcgtcgctgctgctg

SEQ ID NO: 2449 - DNA, 37 bp, Homo sapiens
ccacttccatggatttaaaggcaggcggcggcggcgg

SEQ ID NO: 2450 - DNA, 22 bp, Homo sapiens
tttaaaggcaggcggcggcggc

SEQ ID NO: 2451 - DNA, 44 bp, Homo sapiens
gccgccttgccgccgtacgcagcagccaagcagtccgcctcgta

SEQ ID NO: 2452 - DNA, 22 bp, Homo sapiens
cgcagcagccaagcagtccgcc

SEQ ID NO: 2453 - DNA, 22 bp, Homo sapiens
ttgccgccgtacgcagcagcca

SEQ ID NO: 2454 - DNA, 29 bp, Homo sapiens
ccgggcgggctggacgaggaggacgtgga

SEQ ID NO: 2455 - DNA, 22 bp, Homo sapiens
cgggctggacgaggaggacgtg

SEQ ID NO: 2456 - DNA, 30 bp, Homo sapiens
gcaggtgcgcggcctccctgctctgagctg

SEQ ID NO: 2457 - DNA, 22 bp, Homo sapiens
ggtgcgcggcctccctgctctg

SEQ ID NO: 2458 - DNA, 31 bp, Homo sapiens
tgggtcccaggccaccaggcgttgcatgaac

SEQ ID NO: 2459 - DNA, 22 bp, Homo sapiens
tcccaggccaccaggcgttgca

SEQ ID NO: 2460 - DNA, 31 bp, Homo sapiens
gccgccttgccgccgtacgcagcagccaagc

SEQ ID NO: 2461 - DNA, 22 bp, Homo sapiens
cgccttgccgccgtacgcagca

SEQ ID NO: 2462 - DNA, 23 bp, Homo sapiens
cgtggtcgccgatgctgcccagc

SEQ ID NO: 2463 - DNA, 22 bp, Homo sapiens
cgtggtcgccgatgctgcccag

SEQ ID NO: 2464 - DNA, 43 bp, Homo sapiens
cgcccagcggctccaggtacgggctgaagtcgatggcgcgctc

SEQ ID NO: 2465 - DNA, 22 bp, Homo sapiens
cgggctgaagtcgatggcgcgc

SEQ ID NO: 2466 - DNA, 22 bp, Homo sapiens
gcgcccagcggctccaggtacg

SEQ ID NO: 2467 - DNA, 35 bp, Homo sapiens
gcggagccgcctcgaaggtgtccgtggccgtggcg

SEQ ID NO: 2468 - DNA, 22 bp, Homo sapiens
cgaaggtgtccgtggccgtggc

SEQ ID NO: 2469 - DNA, 22 bp, Homo sapiens
cggagccgcctcgaaggtgtcc

SEQ ID NO: 2470 - DNA, 48 bp, Homo sapiens
ggtgcagcgcgcccttggcagcccccaggcgccccaggctcacgtagc

SEQ ID NO: 2471 - DNA, 22 bp, Homo sapiens
ccccaggcgccccaggctcacg

SEQ ID NO: 2472 - DNA, 22 bp, Homo sapiens
gcccttggcagcccccaggcgc

SEQ ID NO: 2473 - DNA, 22 bp, Homo sapiens
tgcagcgcgcccttggcagccc

SEQ ID NO: 2474 - DNA, 25 bp, Homo sapiens
gctcgaagcccggctccgccttgag

SEQ ID NO: 2475 - DNA, 22 bp, Homo sapiens
tcgaagcccggctccgccttga

SEQ ID NO: 2476 - DNA, 27 bp, Homo sapiens
ggcctcctccttccgcttgcagtccgc

SEQ ID NO: 2477 - DNA, 22 bp, Homo sapiens
cctccttccgcttgcagtccgc

SEQ ID NO: 2478 - DNA, 23 bp, Homo sapiens
gggaagcccgccgccatgcctgc

SEQ ID NO: 2479 - DNA, 22 bp, Homo sapiens
ggaagcccgccgccatgcctgc

SEQ ID NO: 2480 - DNA, 41 bp, Homo sapiens
gccgctcggcaccgcctggtagccgaggtaagcgcgcagcg

SEQ ID NO: 2481 - DNA, 22 bp, Homo sapiens
ccgctcggcaccgcctggtagc

SEQ ID NO: 2482 - DNA, 22 bp, Homo sapiens
tagccgaggtaagcgcgcagcg

SEQ ID NO: 2483 - DNA, 39 bp, Homo sapiens
tcttcttggccttgctcttgacctgcgagggcgccggcc

SEQ ID NO: 2484 - DNA, 22 bp, Homo sapiens
tcttgacctgcgagggcgccgg

SEQ ID NO: 2485 - DNA, 47 bp, Homo sapiens
cggctcttgcgcacggcgatgttgttgcgctcgcgccggatcttgta

SEQ ID NO: 2486 - DNA, 22 bp, Homo sapiens
cgatgttgttgcgctcgcgccg

SEQ ID NO: 2487 - DNA, 22 bp, Homo sapiens
cggctcttgcgcacggcgatgt

SEQ ID NO: 2488 - DNA, 28 bp, Homo sapiens
gggccgcgctagcagtggccggaggagg

SEQ ID NO: 2489 - DNA, 22 bp, Homo sapiens
cgcgctagcagtggccggagga

SEQ ID NO: 2490 - DNA, 46 bp, Homo sapiens
atttcttctttatacaccacgggcgggagccatctgcatgtacggt

SEQ ID NO: 2491 - DNA, 22 bp, Homo sapiens
cgggagccatctgcatgtacgg

SEQ ID NO: 2492 - DNA, 22 bp, Homo sapiens
ccacgggcgggagccatctgca

SEQ ID NO: 2493 - DNA, 38 bp, Homo sapiens
gcccagccccgccgccttttctagccccggctgacgtg

SEQ ID NO: 2494 - DNA, 22 bp, Homo sapiens
ttttctagccccggctgacgtg

SEQ ID NO: 2495 - DNA, 22 bp, Homo sapiens
cccgccgccttttctagccccg

SEQ ID NO: 2496 - DNA, 22 bp, Homo sapiens
gcccagccccgccgccttttct

SEQ ID NO: 2497 - DNA, 26 bp, Homo sapiens
cgccgcccgccttgtgattgctgttg

SEQ ID NO: 2498 - DNA, 22 bp, Homo sapiens
cgccgcccgccttgtgattgct

SEQ ID NO: 2499 - DNA, 25 bp, Homo sapiens
gggccgccgggaagaagctccaggg

SEQ ID NO: 2500 - DNA, 22 bp, Homo sapiens
gggccgccgggaagaagctcca

SEQ ID NO: 2501 - DNA, 41 bp, Homo sapiens
cggcggctctggcgtcggcagcagggcgtccgctccgggcc

SEQ ID NO: 2502 - DNA, 22 bp, Homo sapiens
ggcagcagggcgtccgctccgg

SEQ ID NO: 2503 - DNA, 22 bp, Homo sapiens
cggcggctctggcgtcggcagc

SEQ ID NO: 2504 - DNA, 40 bp, Homo sapiens
gcgtcgggccgggctctgcgtccaagcgaggctgtcacct

SEQ ID NO: 2505 - DNA, 22 bp, Homo sapiens
cgtcgggccgggctctgcgtcc

SEQ ID NO: 2506 - DNA, 22 bp, Homo sapiens
gcgtccaagcgaggctgtcacc

SEQ ID NO: 2507 - DNA, 35 bp, Homo sapiens
cgcccggcccggttcgtagaagggcgcaggctccg

SEQ ID NO: 2508 - DNA, 22 bp, Homo sapiens
tcgtagaagggcgcaggctccg

SEQ ID NO: 2509 - DNA, 22 bp, Homo sapiens
cgcccggcccggttcgtagaag

SEQ ID NO: 2510 - DNA, 52 bp, Homo sapiens
gctcgtcgtggcacagctccagggtgggcacggcggccatggagtcgatgta

SEQ ID NO: 2511 - DNA, 22 bp, Homo sapiens
gcacggcggccatggagtcgat

SEQ ID NO: 2512 - DNA, 22 bp, Homo sapiens
gctccagggtgggcacggcggc

SEQ ID NO: 2513 - DNA, 22 bp, Homo sapiens
tcgtcgtggcacagctccaggg

SEQ ID NO: 2514 - DNA, 29 bp, Homo sapiens
gctgccctgcggccgccaagctcaccacg

SEQ ID NO: 2515 - DNA, 22 bp, Homo sapiens
cctgcggccgccaagctcacca

SEQ ID NO: 2516 - DNA, 25 bp, Homo sapiens
cccctcttgccggcgctcttctccc

SEQ ID NO: 2517 - DNA, 22 bp, Homo sapiens
cccctcttgccggcgctcttct

SEQ ID NO: 2518 - DNA, 24 bp, Homo sapiens
cggctcttgcgcacggcgatgttg

SEQ ID NO: 2519 - DNA, 22 bp, Homo sapiens
cggctcttgcgcacggcgatgt

SEQ ID NO: 2520 - DNA, 39 bp, Homo sapiens
ttctgctgcatctcctggttgcgccgcttggccttgtcg

SEQ ID NO: 2521 - DNA, 22 bp, Homo sapiens
ctcctggttgcgccgcttggcc

SEQ ID NO: 2522 - DNA, 24 bp, Homo sapiens
cgcgcgttaccggcagtctgctgt

SEQ ID NO: 2523 - DNA, 23 bp, Homo sapiens
cgcgcgttaccggcagtctgctg

SEQ ID NO: 2524 - DNA, 23 bp, Homo sapiens
cgagggctgcggcggctggcggc

SEQ ID NO: 2525 - DNA, 22 bp, Homo sapiens
cgagggctgcggcggctggcgg

SEQ ID NO: 2526 - DNA, 28 bp, Homo sapiens
gcagcgcggcggagggaacggcagggcc

SEQ ID NO: 2527 - DNA, 22 bp, Homo sapiens
gcggcggagggaacggcagggc

SEQ ID NO: 2528 - DNA, 38 bp, Homo sapiens
gggcctgccggctggagaaggaagaggcggcggcaggc

SEQ ID NO: 2529 - DNA, 22 bp, Homo sapiens
gaaggaagaggcggcggcaggc

SEQ ID NO: 2530 - DNA, 22 bp, Homo sapiens
gggcctgccggctggagaagga

SEQ ID NO: 2531 - DNA, 42 bp, Homo sapiens
gacctgtacttccagtgccccctcctccaccgccactaccaa

SEQ ID NO: 2532 - DNA, 22 bp, Homo sapiens
agtgccccctcctccaccgcca

SEQ ID NO: 2533 - DNA, 34 bp, Homo sapiens
gctcaggtcgcccccagccctcagcaaatcctcc

SEQ ID NO: 2534 - DNA, 22 bp, Homo sapiens
ggtcggccccagccctcagcaa

SEQ ID NO: 2535 - DNA, 35 bp, Homo sapiens
cttgtggaggcaggcgagagaggcagcgagtgggc

SEQ ID NO: 2536 - DNA, 25 bp, Homo sapiens
tggaggcaggcgagagaggcagcga

SEQ ID NO: 2537 - DNA, 22 bp, Homo sapiens
gctgcgtgcaggccgagggctg

SEQ ID NO: 2538 - DNA, 21 bp, Homo sapiens
gggccggtggctgcgtgcagg

SEQ ID NO: 2539 - DNA, 38 bp, Homo sapiens
gagtccgcgttcggcctcctggcgcgggtgggctctcc

SEQ ID NO: 2540 - DNA, 22 bp, Homo sapiens
cggcctcctggcgcgggtgggc

SEQ ID NO: 2541 - DNA, 22 bp, Homo sapiens
tcctggcgcgggtgggctctcc

SEQ ID NO: 2542 - DNA, 23 bp, Homo sapiens
gagtccgcgttcggcctcctggc

SEQ ID NO: 2543 - DNA, 32 bp, Homo sapiens
cgatctcccagctgccggtcccctccaccttc

SEQ ID NO: 2544 - DNA, 22 bp, Homo sapiens
tcccagctgccggtcccctcca

SEQ ID NO: 2545 - DNA, 22 bp, Homo sapiens
ccgcaccacgctgaggtccatc

SEQ ID NO: 2546 - DNA, 23 bp, Homo sapiens
gagccgcaccacgctgaggtcca

SEQ ID NO: 2547 - DNA, 28 bp, Homo sapiens
accaaacatgcctccgcctccagctccg

SEQ ID NO: 2548 - DNA, 22 bp, Homo sapiens
catgcctccgcctccagctccg

SEQ ID NO: 2549 - DNA, 25 bp, Homo sapiens
accattcccaacggtggcctcgctg

SEQ ID NO: 2550 - DNA, 22 bp, Homo sapiens
ccattcccaacggtggcctcgc

SEQ ID NO: 2551 - DNA, 29 bp, Homo sapiens
ccccagcggccaccagcagcagcaaacat

SEQ ID NO: 2552 - DNA, 22 bp, Homo sapiens
cccagcggccaccagcagcagc

SEQ ID NO: 2553 - DNA, 36 bp, Homo sapiens
gcggaaggatgtctccacgcccgtgtcgcagacact

SEQ ID NO: 2554 - DNA, 22 bp, Homo sapiens
tgtctccacgcccgtgtcgcag

SEQ ID NO: 2555 - DNA, 47 bp, Homo sapiens
gttaaatcgagaatgattcaggcgggccggctctctgagcacctttg

SEQ ID NO: 2556 - DNA, 22 bp, Homo sapiens
caggcgggccggctctctgagc

SEQ ID NO: 2557 - DNA, 26 bp, Homo sapiens
aggaaggacaggcggcaggcggaggg

SEQ ID NO: 2558 - DNA, 22 bp, Homo sapiens
ggaaggacaggcggcaggcgga

SEQ ID NO: 2559 - DNA, 49 bp, Homo sapiens
gcagctgggcccgcggcgtgcactacagacgagccattcgccggaattc

SEQ ID NO: 2560 - DNA, 22 bp, Homo sapiens
gacgagccattcgccggaattc

SEQ ID NO: 2561 - DNA, 22 bp, Homo sapiens
cccgcggcgtgcactacagacg

SEQ ID NO: 2562 - DNA, 22 bp, Homo sapiens
gcagctgggcccgcggcgtgca

SEQ ID NO: 2563 - DNA, 26 bp, Homo sapiens
ggatgctgcccgcggagcgcccctcg

SEQ ID NO: 2564 - DNA, 22 bp, Homo sapiens
gctgcccgcggagcgcccctcg

SEQ ID NO: 2565 - DNA, 40 bp, Homo sapiens
tctggaaactgtggatgcagcggtccgggcagagctcagc

SEQ ID NO: 2566 - DNA, 22 bp, Homo sapiens
tgtggatgcagcggtccgggca

SEQ ID NO: 2567 - DNA, 27 bp, Homo sapiens
gggcctgcctgatgggtcccgcactgt

SEQ ID NO: 2568 - DNA, 22 bp, Homo sapiens
gggcctgcctgatgggtcccgc

SEQ ID NO: 2569 - DNA, 25 bp, Homo sapiens
gcctcccagcctggtcccgtgaaat

SEQ ID NO: 2570 - DNA, 22 bp, Homo sapiens
gcctcccagcctggtcccgtga

SEQ ID NO: 2571 - DNA, 31 bp, Homo sapiens
ggaaggccgccgcagctgcatggagacacgc

SEQ ID NO: 2572 - DNA, 22 bp, Homo sapiens
ggccgccgcagctgcatggaga

SEQ ID NO: 2573 - DNA, 32 bp, Homo sapiens
aggcacagcaatgcgtcgaggtggaggccggg

SEQ ID NO: 2574 - DNA, 22 bp, Homo sapiens
atgcgtcgaggtggaggccggg

SEQ ID NO: 2575 - DNA, 22 bp, Homo sapiens
gggcccccagtggagcaggagc

SEQ ID NO: 2576 - DNA, 40 bp, Homo sapiens
ccagaattttagacgcccgcctcctccagccgcctgtccg

SEQ ID NO: 2577 - DNA, 25 bp, Homo sapiens
gacgcccgcctcctccagccgcctg

SEQ ID NO: 2578 - DNA, 31 bp, Homo sapiens
ccgaagggctgggagaaggtgggcaaggcct

SEQ ID NO: 2579 - DNA, 24 bp, Homo sapiens
gggctgggagaaggtgggcaaggc

SEQ ID NO: 2580 - DNA, 35 bp, Homo sapiens
gcagatccaggcactcagggcttcgggctcggacc

SEQ ID NO: 2581 - DNA, 23 bp, Homo sapiens
ggcactcagggcttcgggctcgg

SEQ ID NO: 2582 - DNA, 40 bp, Homo sapiens
gctagatgcaaggctgttcgtcccccctgccgctctgtgg

SEQ ID NO: 2583 - DNA, 22 bp, Homo sapiens
cgtcccccctgccgctctgtgg

SEQ ID NO: 2584 - DNA, 22 bp, Homo sapiens
ggctgttcgtcccccctgccgc

SEQ ID NO: 2585 - DNA, 33 bp, Homo sapiens
ccttcagaaggaggcgggtgagggtcgggtacc

SEQ ID NO: 2586 - DNA, 22 bp, Homo sapiens
aaggaggcgggtgagggtcggg

SEQ ID NO: 2587 - DNA, 30 bp, Homo sapiens
acctgccaggtccccgccagccagctcgta

SEQ ID NO: 2588 - DNA, 22 bp, Homo sapiens
tgccaggtccccgccagccagc

SEQ ID NO: 2589 - DNA, 36 bp, Homo sapiens
ccccacagaaacggcgcagatccccagctccgagca

SEQ ID NO: 2590 - DNA, 22 bp, Homo sapiens
cggcgcagatccccagctccga

SEQ ID NO: 2591 - DNA, 20 bp, Homo sapiens
ccccacagaaacggcgcaga

SEQ ID NO: 2592 - DNA, 38 bp, Homo sapiens
aggtgggcaaggccttcctccgcttccgctgcacctct

SEQ ID NO: 2593 - DNA, 23 bp, Homo sapiens
ggccttcctccgcttccgctgca

SEQ ID NO: 2594 - DNA, 22 bp, Homo sapiens
ggtgggcaaggccttcctccgc

SEQ ID NO: 2595 - DNA, 27 bp, Homo sapiens
cgtagcccccggctgcacccccagagc

SEQ ID NO: 2596 - DNA, 22 bp, Homo sapiens
gcccccggctgcacccccagag

SEQ ID NO: 2597 - DNA, 23 bp, Homo sapiens
gggcccgcgccggactggtaggg

SEQ ID NO: 2598 - DNA, 22 bp, Homo sapiens
ggcccgcgccggactggtaggg

SEQ ID NO: 2599 - DNA, 39 bp, Homo sapiens
ggcttcctccccggagtccctgctgggcaccgtggcggc

SEQ ID NO: 2600 - DNA, 22 bp, Homo sapiens
tccctgctgggcaccgtggcgg

SEQ ID NO: 2601 - DNA, 22 bp, Homo sapiens
tcctccccggagtccctgctgg

SEQ ID NO: 2602 - DNA, 24 bp, Homo sapiens
gctcggctccgcggcttcctcccc

SEQ ID NO: 2603 - DNA, 22 bp, Homo sapiens
tcggctccgcggcttcctcccc

SEQ ID NO: 2604 - DNA, 24 bp, Homo sapiens
gctgcgtgcgccaggccgaacagg

SEQ ID NO: 2605 - DNA, 22 bp, Homo sapiens
gctgcgtgcgccaggccgaaca

SEQ ID NO: 2606 - DNA, 38 bp, Homo sapiens
ccacactcgtctgccccgtgatcaccgccaggtgcagg

SEQ ID NO: 2607 - DNA, 22 bp, Homo sapiens
ctgccccgtgatcaccgccagg

SEQ ID NO: 2608 - DNA, 26 bp, Homo sapiens
gcctgcccgcagcgccagatgcatgg

SEQ ID NO: 2609 - DNA, 22 bp, Homo sapiens
gcccgcagcgccagatgcatgg

SEQ ID NO: 2610 - DNA, 34 bp, Homo sapiens
gcaaaggtgcgagcgttcacgttggcccggagct

SEQ ID NO: 2611 - DNA, 22 bp, Homo sapiens
gcgagcgttcacgttggcccgg

SEQ ID NO: 2612 - DNA, 25 bp, Homo sapiens
gcgtgtggccccggaagctgcttcg

SEQ ID NO: 2613 - DNA, 22 bp, Homo sapiens
gcgtgtggccccggaagctgct

SEQ ID NO: 2614 - DNA, 29 bp, Homo sapiens
gggtgcccgtgcgagagccctcctggtgg

SEQ ID NO: 2615 - DNA, 22 bp, Homo sapiens
gcccgtgcgagagccctcctgg

SEQ ID NO: 2616 - DNA, 36 bp, Homo sapiens
cgcctcgtgccggtccctttcctgcccccaccccgg

SEQ ID NO: 2617 - DNA, 22 bp, Homo sapiens
ccctttcctgcccccaccccgg

SEQ ID NO: 2618 - DNA, 22 bp, Homo sapiens
cgcctcgtgccggtccctttcc

SEQ ID NO: 2619 - DNA, 32 bp, Homo sapiens
gccccgaccgccctcatagtctccctcgctgg

SEQ ID NO: 2620 - DNA, 22 bp, Homo sapiens
ccgccctcatagtctccctcgc

SEQ ID NO: 2621 - DNA, 27 bp, Homo sapiens
gccttgtggtcgccgccgctggtctgg

SEQ ID NO: 2622 - DNA, 22 bp, Homo sapiens
gtggtcgccgccgctggtctgg

SEQ ID NO: 2623 - DNA, 39 bp, Homo sapiens
cttttccctagccccctaatcgccaccaagccctcctgc

SEQ ID NO: 2624 - DNA, 22 bp, Homo sapiens
aatcgccaccaagccctcctgc

SEQ ID NO: 2625 - DNA, 32 bp, Homo sapiens
gcaagccctgctccttacctcccgccgactgc

SEQ ID NO: 2626 - DNA, 22 bp, Homo sapiens
cctgctccttacctcccgccga

SEQ ID NO: 2627 - DNA, 44 bp, Homo sapiens
gaaatgccattctccatcgcccccacctcttcacctcaccattg

SEQ ID NO: 2628 - DNA, 22 bp, Homo sapiens
ccatcgcccccacctcttcacc

SEQ ID NO: 2629 - DNA, 51 bp, Homo sapiens
ttccccaatcttccctccaagccccccactctgcccactgctcccgaaggt

SEQ ID NO: 2630 - DNA, 22 bp, Homo sapiens
agccccccactctgcccactgc

SEQ ID NO: 2631 - DNA, 39 bp, Homo sapiens
ccgccgcggctgaactctcatcttgactcgctgctcctc

SEQ ID NO: 2632 - DNA, 22 bp, Homo sapiens
tcatcttgactcgctgctcctc

SEQ ID NO: 2633 - DNA, 42 bp, Homo sapiens
acggattgttcattcttgagtctgctgctgctgccgccgcgg

SEQ ID NO: 2634 - DNA, 22 bp, Homo sapiens
tctgctgctgctgccgccgcgg

SEQ ID NO: 2635 - DNA, 22 bp, Homo sapiens
gagtctgctgctgctgccgccg

SEQ ID NO: 2636 - DNA, 48 bp, Homo sapiens
cactgaaggctgctgggaaggctggcttggctgctgcgaatcccccga

SEQ ID NO: 2637 - DNA, 22 bp, Homo sapiens
ttggctgctgcgaatcccccga

SEQ ID NO: 2638 - DNA, 22 bp, Homo sapiens
gaaggctgctgggaaggctggc

SEQ ID NO: 2639 - DNA, 29 bp, Homo sapiens
cagctgtgcctgtgcctgtgcctgctgga

SEQ ID NO: 2640 - DNA, 22 bp, Homo sapiens
tgcctgtgcctgtgcctgctgg

SEQ ID NO: 2641 - DNA, 33 bp, Homo sapiens
cactgtgctgctggctggcggagtgctgctgca

SEQ ID NO: 2642 - DNA, 22 bp, Homo sapiens
ctggctggcggagtgctgctgc

SEQ ID NO: 2643 - DNA, 37 bp, Homo sapiens
gcgtcatgggcgtggcagcagaggcggagatggtggc

SEQ ID NO: 2644 - DNA, 22 bp, Homo sapiens
tgggcgtggcagcagaggcgga

SEQ ID NO: 2645 - DNA, 30 bp, Homo sapiens
gggttgctggctgggaggtgagggtgatgc

SEQ ID NO: 2646 - DNA, 22 bp, Homo sapiens
tgctggctgggaggtgagggtg

SEQ ID NO: 2647 - DNA, 36 bp, Homo sapiens
ctggagaattcagggcacttgggctggagagggacg

SEQ ID NO: 2648 - DNA, 22 bp, Homo sapiens
gggcacttgggctggagaggga

SEQ ID NO: 2649 - DNA, 43 bp, Homo sapiens
gatggactcagcagaggtggaggtggcgtgaaggctggctaca

SEQ ID NO: 2650 - DNA, 22 bp, Homo sapiens
tggaggtggcgtgaaggctggc

SEQ ID NO: 2651 - DNA, 36 bp, Homo sapiens
ccttggaggcggtggtggtggtggacgcagccccgc

SEQ ID NO: 2652 - DNA, 22 bp, Homo sapiens
gtggtggtggacgcagccccgc

SEQ ID NO: 2653 - DNA, 22 bp, Homo sapiens
tggaggcggtggtggtggtgga

SEQ ID NO: 2654 - DNA, 28 bp, Homo sapiens
gcgggtcgggcagcgtagggcgggtcac

SEQ ID NO: 2655 - DNA, 22 bp, Homo sapiens
gcgggtcgggcagcgtagggcg

SEQ ID NO: 2656 - DNA, 48 bp, Homo sapiens
gggctgcgggtgcgagaggtgcgggtcgggcagcgtagggcgggtcac

SEQ ID NO: 2657 - DNA, 22 bp, Homo sapiens
gctgcgggtgcgagaggtgcgg

SEQ ID NO: 2658 - DNA, 41 bp, Homo sapiens
cgcagccccgcccccgcccccaccccctccagctgtccggc

SEQ ID NO: 2659 - DNA, 22 bp, Homo sapiens
cgcagccccgcccccgccccca

SEQ ID NO: 2660 - DNA, 22 bp, Homo sapiens
cgcccccaccccctccagctgt

SEQ ID NO: 2661 - DNA, 30 bp, Homo sapiens
gaagtgaaccatgctgcccgccccgccagg

SEQ ID NO: 2662 - DNA, 22 bp, Homo sapiens
aaccatgctgcccgccccgcca

SEQ ID NO: 2663 - DNA, 38 bp, Homo sapiens
ccgccgcgggctgctgctgctgctcctgctgctgccag

SEQ ID NO: 2664 - DNA, 23 bp, Homo sapiens
gctgctgctcctgctgctgccag

SEQ ID NO: 2665 - DNA, 23 bp, Homo sapiens
ccgccgcgggctgctgctgctgc

SEQ ID NO: 2666 - DNA, 40 bp, Homo sapiens
cgaagaggttgctctgcagcggcggcgtgggcaggcaggc

SEQ ID NO: 2667 - DNA, 22 bp, Homo sapiens
gcggcggcgtgggcaggcaggc

SEQ ID NO: 2668 - DNA, 23 bp, Homo sapiens
tgctctgcagcggcggcgtgggc

SEQ ID NO: 2669 - DNA, 22 bp, Homo sapiens
gccgccaccgccgcctcccccg

SEQ ID NO: 2670 - DNA, 22 bp, Homo sapiens
gccgccaccgccgcctcccccg

SEQ ID NO: 2671 - DNA, 26 bp, Homo sapiens
ggagccgcccaggagcccgccgcccg

SEQ ID NO: 2672 - DNA, 22 bp, Homo sapiens
agccgcccaggagcccgccgcc

SEQ ID NO: 2673 - DNA, 22 bp, Homo sapiens
cgccgccgccgccaccagcccg

SEQ ID NO: 2674 - DNA, 21 bp, Homo sapiens
gccgccgccgccaccagcccg

SEQ ID NO: 2675 - DNA, 29 bp, Homo sapiens
gccgacgccgccgccgctgccgctgccgc

SEQ ID NO: 2676 - DNA, 20 bp, Homo sapiens
acgccgccgccgctgccgct

SEQ ID NO: 2677 - DNA, 33 bp, Homo sapiens
gccgccgccgccgatgccgctgccacctgcccg

SEQ ID NO: 2678 - DNA, 22 bp, Homo sapiens
cgatgccgctgccacctgcccg

SEQ ID NO: 2679 - DNA, 22 bp, Homo sapiens
gccgccgccgatgccgctgcca

SEQ ID NO: 2680 - DNA, 23 bp, Homo sapiens
cgcttcttctcgccgccgttgaa

SEQ ID NO: 2681 - DNA, 22 bp, Homo sapiens
cgcttcttctcgccgccgttga

SEQ ID NO: 2682 - DNA, 47 bp, Homo sapiens
cctcagctccccattctgtcccgcccgacacctcccagccccctcag

SEQ ID NO: 2683 - DNA, 22 bp, Homo sapiens
cccgcccgacacctcccagccc

SEQ ID NO: 2684 - DNA, 22 bp, Homo sapiens
gctccccattctgtcccgcccg

SEQ ID NO: 2685 - DNA, 56 bp, Homo sapiens
ggtctccgctttccttccccccactccccactcccccgaatgctcccccccttctc

SEQ ID NO: 2686 - DNA, 22 bp, Homo sapiens
tcccccgaatgctccccccctt

SEQ ID NO: 2687 - DNA, 21 bp, Homo sapiens
ccccactccccactcccccga

SEQ ID NO: 2688 - DNA, 22 bp, Homo sapiens
ccgctttccttccccccactcc

SEQ ID NO: 2689 - DNA, 50 bp, Homo sapiens
ccattttcctacccttcccgcgtctccccccacccaaaccccagaaccat

SEQ ID NO: 2690 - DNA, 24 bp, Homo sapiens
ttcccgcgtctccccccacccaaa

SEQ ID NO: 2691 - DNA, 22 bp, Homo sapiens
tccccccacccaaaccccagaa

SEQ ID NO: 2692 - DNA, 37 bp, Homo sapiens
ttccacctaagcaagcagccagcctccccctgaccct

SEQ ID NO: 2693 - DNA, 22 bp, Homo sapiens
aagcaagcagccagcctccccc

SEQ ID NO: 2694 - DNA, 31 bp, Homo sapiens
ggtcccgcttctccgacagctctagccccgc

SEQ ID NO: 2695 - DNA, 22 bp, Homo sapiens
tctccgacagctctagccccgc

SEQ ID NO: 2696 - DNA, 24 bp, Homo sapiens
ctgctgctgccaggcgctccctct

SEQ ID NO: 2697 - DNA, 22 bp, Homo sapiens
tgctgctgccaggcgctccctc

SEQ ID NO: 2698 - DNA, 22 bp, Homo sapiens
cgatgtccacggccgccagcgc

SEQ ID NO: 2699 - DNA, 39 bp, Homo sapiens
ctgttcatcgtgtggtacgtggcgtccggcttgaaagga

SEQ ID NO: 2700 - DNA, 22 bp, Homo sapiens
cgtggcgtccggcttgaaagga

SEQ ID NO: 2701 - DNA, 22 bp, Homo sapiens
cgtgtggtacgtggcgtccggc

SEQ ID NO: 2702 - DNA, 29 bp, Homo sapiens
gccgggttcgagcgcctggtggtggtggt

SEQ ID NO: 2703 - DNA, 22 bp, Homo sapiens
gccgggttcgagcgcctggtgg

SEQ ID NO: 2704 - DNA, 25 bp, Homo sapiens
gccggccatgagcgcgagcgacggc

SEQ ID NO: 2705 - DNA, 22 bp, Homo sapiens
cggccatgagcgcgagcgacgg

SEQ ID NO: 2706 - DNA, 24 bp, Homo sapiens
cccggacggcatgttcatggcggc

SEQ ID NO: 2707 - DNA, 22 bp, Homo sapiens
cccggacggcatgttcatggcg

SEQ ID NO: 2708 - DNA, 32 bp, Homo sapiens
tccgagtcgcagatggacgccaggcccgctgc

SEQ ID NO: 2709 - DNA, 22 bp, Homo sapiens
cgcagatggacgccaggcccgc

SEQ ID NO: 2710 - DNA, 32 bp, Homo sapiens
cccacgtcggcctgcgtcacgcccagcttgat

SEQ ID NO: 2711 - DNA, 22 bp, Homo sapiens
cccacgtcggcctgcgtcacgc

SEQ ID NO: 2712 - DNA, 25 bp, Homo sapiens
cgaggctgaatggcaaagtaggctt

SEQ ID NO: 2713 - DNA, 25 bp, Homo sapiens
ccgaggctgaatggcaaagtaggct

SEQ ID NO: 2714 - DNA, 27 bp, Homo sapiens
gccagcgcggagcccacatctgcctgg

SEQ ID NO: 2715 - DNA, 23 bp, Homo sapiens
gccagcgcggagcccacatctgc

SEQ ID NO: 2716 - DNA, 27 bp, Homo sapiens
gggatcttgaggttggccagcgcggag

SEQ ID NO: 2717 - DNA, 22 bp, Homo sapiens
ttgaggttggccagcgcggagc

SEQ ID NO: 2718 - DNA, 35 bp, Homo sapiens
tgagcttctcgcggtgggacttctcggcctcctcg

SEQ ID NO: 2719 - DNA, 22 bp, Homo sapiens
ctcgcggtgggacttctcggcc

SEQ ID NO: 2720 - DNA, 19 bp, Homo sapiens
tgggacttctcggcctcct

SEQ ID NO: 2721 - DNA, 31 bp, Homo sapiens
gcccaatcgccgccgccgcctcctcccgtgg

SEQ ID NO: 2722 - DNA, 22 bp, Homo sapiens
gcccaatcgccgccgccgcctc

SEQ ID NO: 2723 - DNA, 30 bp, Homo sapiens
ggtgccgccgcctcctgccttgccgtgttc

SEQ ID NO: 2724 - DNA, 22 bp, Homo sapiens
gccgccgcctcctgccttgccg

SEQ ID NO: 2725 - DNA, 32 bp, Homo sapiens
cgtggaaacctccgccgccgccgccgtcgtcg

SEQ ID NO: 2726 - DNA, 22 bp, Homo sapiens
tggaaacctccgccgccgccgc

SEQ ID NO: 2727 - DNA, 29 bp, Homo sapiens
cgccgccaccgcccgccgccagcatcccg

SEQ ID NO: 2728 - DNA, 22 bp, Homo sapiens
cgccaccgcccgccgccagcat

SEQ ID NO: 2729 - DNA, 28 bp, Homo sapiens
cccagatgcggcggcggcgacggctcca

SEQ ID NO: 2730 - DNA, 22 bp, Homo sapiens
tgcggcggcggcgacggctcca

SEQ ID NO: 2731 - DNA, 26 bp, Homo sapiens
catgtccgtgtgcgtgtccgtgggcg

SEQ ID NO: 2732 - DNA, 22 bp, Homo sapiens
tccgtgtgcgtgtccgtgggcg

SEQ ID NO: 2733 - DNA, 28 bp, Homo sapiens
cgcccaccgatgagccgccgccgcccgc

SEQ ID NO: 2734 - DNA, 22 bp, Homo sapiens
ccgatgagccgccgccgcccgc

SEQ ID NO: 2735 - DNA, 30 bp, Homo sapiens
gcttgatgcgccgctgcttgaactgcttgg

SEQ ID NO: 2736 - DNA, 22 bp, Homo sapiens
cgccgctgcttgaactgcttgg

SEQ ID NO: 2737 - DNA, 28 bp, Homo sapiens
gggcagagagcaggcggcgggcaggatg

SEQ ID NO: 2738 - DNA, 22 bp, Homo sapiens
gggcagagagcaggcggcgggc

SEQ ID NO: 2739 - DNA, 40 bp, Homo sapiens
gggcgagaaggcgaaatccgaagccaggtgtcccgccatg

SEQ ID NO: 2740 - DNA, 22 bp, Homo sapiens
tccgaagccaggtgtcccgcca

SEQ ID NO: 2741 - DNA, 22 bp, Homo sapiens
gggcgagaaggcgaaatccgaa

SEQ ID NO: 2742 - DNA, 40 bp, Homo sapiens
gcccacagtacgccatccccccacagaactcatacggcgg

SEQ ID NO: 2743 - DNA, 22 bp, Homo sapiens
cgccatccccccacagaactca

SEQ ID NO: 2744 - DNA, 29 bp, Homo sapiens
gagttgctctccaccccgactcctgcttc

SEQ ID NO: 2745 - DNA, 22 bp, Homo sapiens
tgctctccaccccgactcctgc

SEQ ID NO: 2746 - DNA, 30 bp, Homo sapiens
cctcaaagcggcagatggtcgtttggctga

SEQ ID NO: 2747 - DNA, 22 bp, Homo sapiens
aagcggcagatggtcgtttggc

SEQ ID NO: 2748 - DNA, 25 bp, Homo sapiens
caagctgctgggcgatgtggctgat

SEQ ID NO: 2749 - DNA, 22 bp, Homo sapiens
gctgctgggcgatgtggctgat

SEQ ID NO: 2750 - DNA, 46 bp, Homo sapiens
ggttttctttccctagctcctcccctccccctgtcccccattccta

SEQ ID NO: 2751 - DNA, 20 bp, Homo sapiens
tcccctccccctgtccccca

SEQ ID NO: 2752 - DNA, 33 bp, Homo sapiens
gttgccccaaactcccctgcccccaccctttgt

SEQ ID NO: 2753 - DNA, 22 bp, Homo sapiens
tgccccaaactcccctgccccc

SEQ ID NO: 2754 - DNA, 24 bp, Homo sapiens
cccaacccccggcccgattcctgg

SEQ ID NO: 2755 - DNA, 22 bp, Homo sapiens
caacccccggcccgattcctgg

SEQ ID NO: 2756 - DNA, 45 bp, Homo sapiens
ggctgaacaggttcccaaatagaacccccaggatgagccccacat

SEQ ID NO: 2757 - DNA, 22 bp, Homo sapiens
agaacccccaggatgagcccca

SEQ ID NO: 2758 - DNA, 33 bp, Homo sapiens
gatactggttcgctttctctttcgggcctgcat

SEQ ID NO: 2759 - DNA, 22 bp, Homo sapiens
tggttcgctttctctttcgggc

SEQ ID NO: 2760 - DNA, 44 bp, Homo sapiens
ggttctctttccctagctcctcccctcccctgttccccattcct

SEQ ID NO: 2761 - DNA, 22 bp, Homo sapiens
tcctcccctcccctgttcccca

SEQ ID NO: 2762 - DNA, 48 bp, Homo sapiens
aagctgaagtcccctttaaccaatacccatcccacctcccacactcat

SEQ ID NO: 2763 - DNA, 22 bp, Homo sapiens
ccaatacccatcccacctccca

SEQ ID NO: 2764 - DNA, 22 bp, Homo sapiens
cccatcccacctcccacactca

SEQ ID NO: 2765 - DNA, 49 bp, Homo sapiens
gtgcatcatcttctcaggcttcttccgcgcagatccttcccacttcttt

SEQ ID NO: 2766 - DNA, 22 bp, Homo sapiens
tcttccgcgcagatccttccca

SEQ ID NO: 2767 - DNA, 23 bp, Homo sapiens
ggccaaaggctgttccacattca

SEQ ID NO: 2768 - DNA, 26 bp, Homo sapiens
tcattctgcaacttgatcccccctca

SEQ ID NO: 2769 - DNA, 22 bp, Homo sapiens
tctgcaacttgatcccccctca

SEQ ID NO: 2770 - DNA, 53 bp, Homo sapiens
gggctgcgcgccacggcccccgacttctttctccctcccaggcgcgctacccg

SEQ ID NO: 2771 - DNA, 22 bp, Homo sapiens
tccctcccaggcgcgctacccg

SEQ ID NO: 2772 - DNA, 22 bp, Homo sapiens
cggcccccgacttctttctccc

SEQ ID NO: 2773 - DNA, 22 bp, Homo sapiens
tgcgcgccacggcccccgactt

SEQ ID NO: 2774 - DNA, 23 bp, Homo sapiens
gcgaccaccgccgccccctcagc

SEQ ID NO: 2775 - DNA, 22 bp, Homo sapiens
cgaccaccgccgccccctcagc

SEQ ID NO: 2776 - DNA, 28 bp, Homo sapiens
ccaaccgtgggaataatgcttttgcggc

SEQ ID NO: 2777 - DNA, 23 bp, Homo sapiens
cgtgggaataatgcttttgcggc

SEQ ID NO: 2778 - DNA, 39 bp, Homo sapiens
tataaatggagtgctgctgggaaatgcggcgtggtgagc

SEQ ID NO: 2779 - DNA, 22 bp, Homo sapiens
gctgctgggaaatgcggcgtgg

SEQ ID NO: 2780 - DNA, 37 bp, Homo sapiens
cgcaaccttggctcaccacaacctccgcttcctgggt

SEQ ID NO: 2781 - DNA, 22 bp, Homo sapiens
ggctcaccacaacctccgcttc

SEQ ID NO: 2782 - DNA, 31 bp, Homo sapiens
aatgcgtgatttgcgggctggctccaaggag

SEQ ID NO: 2783 - DNA, 22 bp, Homo sapiens
gcgtgatttgcgggctggctcc

SEQ ID NO: 2784 - DNA, 26 bp, Homo sapiens
ctagagaaaaagcaggaggcgggcgc

SEQ ID NO: 2785 - DNA, 22 bp, Homo sapiens
agaaaaagcaggaggcgggcgc

SEQ ID NO: 2786 - DNA, 34 bp, Homo sapiens
gcgaagccctgcccaccgccccccgagccagccg

SEQ ID NO: 2787 - DNA, 22 bp, Homo sapiens
tgcccaccgccccccgagccag

SEQ ID NO: 2788 - DNA, 62 bp, Homo sapiens
agccgacctcgactcatgactgcagccccgaacccccacccccacgccgcctaacccgccag

SEQ ID NO: 2789 - DNA, 22 bp, Homo sapiens
cccacgccgcctaacccgccag

SEQ ID NO: 2790 - DNA, 22 bp, Homo sapiens
ccgaacccccacccccacgccg

SEQ ID NO: 2791 - DNA, 22 bp, Homo sapiens
tgactgcagccccgaaccccca

SEQ ID NO: 2792 - DNA, 28 bp, Homo sapiens
ccgaggcgggatggcagggcgggcaggg

SEQ ID NO: 2793 - DNA, 22 bp, Homo sapiens
gggatggcagggcgggcagggc

SEQ ID NO: 2794 - DNA, 21 bp, Homo sapiens
ccgaggcgggatggcagggcg

SEQ ID NO: 2795 - DNA, 39 bp, Homo sapiens
ctggcccaggtgcggtcccactttcccaccccgaggcgg

SEQ ID NO: 2796 - DNA, 22 bp, Homo sapiens
cccactttcccaccccgaggcg

SEQ ID NO: 2797 - DNA, 32 bp, Homo sapiens
ccttcccgggtggctagagcgcgaaagaaaga

SEQ ID NO: 2798 - DNA, 22 bp, Homo sapiens
ttcccgggtggctagagcgcga

SEQ ID NO: 2799 - DNA, 47 bp, Homo sapiens
agcagtttcaaactcaccgcgctaaagggccccggattcaccaatcg

SEQ ID NO: 2800 - DNA, 22 bp, Homo sapiens
ctcaccgcgctaaagggccccg

SEQ ID NO: 2801 - DNA, 27 bp, Homo sapiens
cggcggcgcagcggcagctacaacaag

SEQ ID NO: 2802 - DNA, 22 bp, Homo sapiens
ggcggcgcagcggcagctacaa

SEQ ID NO: 2803 - DNA, 32 bp, Homo sapiens
ccagccgggccccgcgcagatccctgacctcc

SEQ ID NO: 2804 - DNA, 22 bp, Homo sapiens
cagccgggccccgcgcagatcc

SEQ ID NO: 2805 - DNA, 22 bp, Homo sapiens
ggccccgcgcagatccctgacc

SEQ ID NO: 2806 - DNA, 37 bp, Homo sapiens
cccactgccccacccccagccccagcgattttcccga

SEQ ID NO: 2807 - DNA, 22 bp, Homo sapiens
cccagccccagcgattttcccg

SEQ ID NO: 2808 - DNA, 25 bp, Homo sapiens
ggcccgccccttccgcttcacgacg

SEQ ID NO: 2809 - DNA, 22 bp, Homo sapiens
ccgccccttccgcttcacgacg

SEQ ID NO: 2810 - DNA, 26 bp, Homo sapiens
cgtgagccaccgcccccagcagcact

SEQ ID NO: 2811 - DNA, 22 bp, Homo sapiens
tgagccaccgcccccagcagca

SEQ ID NO: 2812 - DNA, 27 bp, Homo sapiens
cgtgagcccccaagccccgcctaccta

SEQ ID NO: 2813 - DNA, 22 bp, Homo sapiens
cgtgagcccccaagccccgcct

SEQ ID NO: 2814 - DNA, 28 bp, Homo sapiens
ggtgatccacccgcctcagcctcccgaa

SEQ ID NO: 2815 - DNA, 22 bp, Homo sapiens
tccacccgcctcagcctcccga

SEQ ID NO: 2816 - DNA, 29 bp, Homo sapiens
cggcgtgggtctcgggcgtctgtggctcc

SEQ ID NO: 2817 - DNA, 22 bp, Homo sapiens
cggcgtgggtctcgggcgtctg

SEQ ID NO: 2818 - DNA, 24 bp, Homo sapiens
cgctgccctcgcccgcttgctccg

SEQ ID NO: 2819 - DNA, 22 bp, Homo sapiens
ctgccctcgcccgcttgctccg

SEQ ID NO: 2820 - DNA, 47 bp, Homo sapiens
gtctgtgtcgccctcgtccgtgtctgcctcccgcttccccgcctcgc

SEQ ID NO: 2821 - DNA, 22 bp, Homo sapiens
tgcctcccgcttccccgcctcg

SEQ ID NO: 2822 - DNA, 33 bp, Homo sapiens
ggaacgcccaaccctccccacgcaccgatctgt

SEQ ID NO: 2823 - DNA, 22 bp, Homo sapiens
gcccaaccctccccacgcaccg

SEQ ID NO: 2824 - DNA, 57 bp, Homo sapiens
ggaagcaccccccgccgcctccgctcccctacaccccgtccccctcaccgagcgtgg

SEQ ID NO: 2825 - DNA, 22 bp, Homo sapiens
cccgtccccctcaccgagcgtg

SEQ ID NO: 2826 - DNA, 22 bp, Homo sapiens
gaagcaccccccgccgcctccg

SEQ ID NO: 2827 - DNA, 33 bp, Homo sapiens
gcagcgccctgagcctgagtccccgcgtgtccg

SEQ ID NO: 2828 - DNA, 22 bp, Homo sapiens
cgccctgagcctgagtccccgc

SEQ ID NO: 2829 - DNA, 25 bp, Homo sapiens
gggatggcggaggcggaaggacggg

SEQ ID NO: 2830 - DNA, 22 bp, Homo sapiens
atggcggaggcggaaggacggg

SEQ ID NO: 2831 - DNA, 40 bp, Homo sapiens
gaccccctgcgtccgccccggcccctcccccaccttgctg

SEQ ID NO: 2832 - DNA, 22 bp, Homo sapiens
cggcccctcccccaccttgctg

SEQ ID NO: 2833 - DNA, 22 bp, Homo sapiens
gaccccctgcgtccgccccggc

SEQ ID NO: 2834 - DNA, 32 bp, Homo sapiens
cgcccccgggaagccttgcacgccgcgccccg

SEQ ID NO: 2835 - DNA, 22 bp, Homo sapiens
aagccttgcacgccgcgccccg

SEQ ID NO: 2836 - DNA, 22 bp, Homo sapiens
cgcccccgggaagccttgcacg

SEQ ID NO: 2837 - DNA, 34 bp, Homo sapiens
gtgtgagccaccgtgccccgccagccatctgtga

SEQ ID NO: 2838 - DNA, 22 bp, Homo sapiens
agccaccgtgccccgccagcca

SEQ ID NO: 2839 - DNA, 22 bp, Homo sapiens
gcccccgcctccgcagccctgg

SEQ ID NO: 2840 - DNA, 26 bp, Homo sapiens
cacaggacagtgggcggtgggtaggc

SEQ ID NO: 2841 - DNA, 24 bp, Homo sapiens
caggacagtgggcggtgggtaggc

SEQ ID NO: 2842 - DNA, 25 bp, Homo sapiens
ctgggaccgaaggatggctgggtgg

SEQ ID NO: 2843 - DNA, 22 bp, Homo sapiens
ggaccgaaggatggctgggtgg

SEQ ID NO: 2844 - DNA, 34 bp, Homo sapiens
ttcctgcacccccttcccaaccctccccgtgcgg

SEQ ID NO: 2845 - DNA, 22 bp, Homo sapiens
ccttcccaaccctccccgtgcg

SEQ ID NO: 2846 - DNA, 34 bp, Homo sapiens
ccagagctggcatcgcacccggaagccgcatggt

SEQ ID NO: 2847 - DNA, 22 bp, Homo sapiens
tcgcacccggaagccgcatggt

SEQ ID NO: 2848 - DNA, 22 bp, Homo sapiens
agctggcatcgcacccggaagc

SEQ ID NO: 2849 - DNA, 26 bp, Homo sapiens
ctctcccaggagccgcacgtagccgc

SEQ ID NO: 2850 - DNA, 22 bp, Homo sapiens
cccaggagccgcacgtagccgc

SEQ ID NO: 2851 - DNA, 22 bp, Homo sapiens
gcatgccccggccacgacagcg

SEQ ID NO: 2852 - DNA, 28 bp, Homo sapiens
cgggcggcgcttgtcggagtggtgctgc

SEQ ID NO: 2853 - DNA, 22 bp, Homo sapiens
cgggcggcgcttgtcggagtgg

SEQ ID NO: 2854 - DNA, 45 bp, Homo sapiens
cgatgacctcctgcgtgtcctggcccacagcgttgcgcagcgtgc

SEQ ID NO: 2855 - DNA, 22 bp, Homo sapiens
cccacagcgttgcgcagcgtgc

SEQ ID NO: 2856 - DNA, 22 bp, Homo sapiens
ctgcgtgtcctggcccacagcg

SEQ ID NO: 2857 - DNA, 36 bp, Homo sapiens
ctcatagatctcgtcggaggcatgggcaggctgggc

SEQ ID NO: 2858 - DNA, 22 bp, Homo sapiens
cggaggcatgggcaggctgggc

SEQ ID NO: 2859 - DNA, 26 bp, Homo sapiens
ccgaggcgcagggcaccccgaatccg

SEQ ID NO: 2860 - DNA, 22 bp, Homo sapiens
ggcgcagggcaccccgaatccg

SEQ ID NO: 2861 - DNA, 34 bp, Homo sapiens
ccagaccagctcgggccagggaacgcagggactg

SEQ ID NO: 2862 - DNA, 22 bp, Homo sapiens
ccagctcgggccagggaacgca

SEQ ID NO: 2863 - DNA, 31 bp, Homo sapiens
gggagcggcgggagcaggagcaggaacagca

SEQ ID NO: 2864 - DNA, 22 bp, Homo sapiens
cgggagcaggagcaggaacagc

SEQ ID NO: 2865 - DNA, 22 bp, Homo sapiens
gggagcggcgggagcaggagca

SEQ ID NO: 2866 - DNA, 41 bp, Homo sapiens
cttgacaatgttaaagcccacctcgccgccaaatgtgctcg

SEQ ID NO: 2867 - DNA, 22 bp, Homo sapiens
cccacctcgccgccaaatgtgc

SEQ ID NO: 2868 - DNA, 26 bp, Homo sapiens
gagcaagagactccggctcatggcgc

SEQ ID NO: 2869 - DNA, 22 bp, Homo sapiens
aagagactccggctcatggcgc

SEQ ID NO: 2870 - DNA, 23 bp, Homo sapiens
gggctgggccgcagtgaatctcg

SEQ ID NO: 2871 - DNA, 22 bp, Homo sapiens
ggctgggccgcagtgaattccg

SEQ ID NO: 2872 - DNA, 30 bp, Homo sapiens
cctgagcaggaagcggcgggccaggagctg

SEQ ID NO: 2873 - DNA, 22 bp, Homo sapiens
gagcaggaagcggcgggccagg

SEQ ID NO: 2874 - DNA, 48 bp, Homo sapiens
gatgtggtggtccatgttcctgcccccaccgatccggccagcaatctg

SEQ ID NO: 2875 - DNA, 22 bp, Homo sapiens
cccccaccgatccggccagcaa

SEQ ID NO: 2876 - DNA, 22 bp, Homo sapiens
gttcctgcccccaccgatccgg

SEQ ID NO: 2877 - DNA, 26 bp, Homo sapiens
ggtcgctccacagcaggcccatcatc

SEQ ID NO: 2878 - DNA, 22 bp, Homo sapiens
tcgctccacagcaggcccatca

SEQ ID NO: 2879 - DNA, 40 bp, Homo sapiens
gcctgagtagaccgagccgaagccgccgctgcccagtagc

SEQ ID NO: 2880 - DNA, 22 bp, Homo sapiens
ccgagccgaagccgccgctgcc

SEQ ID NO: 2881 - DNA, 23 bp, Homo sapiens
gtagaccgagccgaagccgccgc

SEQ ID NO: 2882 - DNA, 32 bp, Homo sapiens
ggttctgacccacccccaccccccacccccgg

SEQ ID NO: 2883 - DNA, 22 bp, Homo sapiens
tctgacccacccccacccccca

SEQ ID NO: 2884 - DNA, 41 bp, Homo sapiens
cctgtttcccccctacctgacccatcgcggcattcagcaga

SEQ ID NO: 2885 - DNA, 22 bp, Homo sapiens
cccctacctgacccatcgcggc

SEQ ID NO: 2886 - DNA, 22 bp, Homo sapiens
tgacccatcgcggcattcagca

SEQ ID NO: 2887 - DNA, 45 bp, Homo sapiens
acaaacagagcaagcgtcgcagccctcccccaaaaggtccccaag

SEQ ID NO: 2888 - DNA, 22 bp, Homo sapiens
gccctcccccaaaaggtcccca

SEQ ID NO: 2889 - DNA, 22 bp, Homo sapiens
gcaagcgtcgcagccctccccc

SEQ ID NO: 2890 - DNA, 23 bp, Homo sapiens
tcccaacctccaggatgcggcgc

SEQ ID NO: 2891 - DNA, 23 bp, Homo sapiens
cgcgggcgcgcaggtgggcaagc

SEQ ID NO: 2892 - DNA, 25 bp, Homo sapiens
gcaggtcgttgcaggcgcgggcgcg

SEQ ID NO: 2893 - DNA, 22 bp, Homo sapiens
ggtcgttgcaggcgcgggcgcg

SEQ ID NO: 2894 - DNA, 33 bp, Homo sapiens
gctccttctccttgcccggcgccagcttggtgg

SEQ ID NO: 2895 - DNA, 22 bp, Homo sapiens
tccttgcccggcgccagcttgg

SEQ ID NO: 2896 - DNA, 22 bp, Homo sapiens
tccttctccttgcccggcgcca

SEQ ID NO: 2897 - DNA, 42 bp, Homo sapiens
tcgaagagatcttgcaccggctcgggcctctccaggatcagg

SEQ ID NO: 2898 - DNA, 22 bp, Homo sapiens
tgcaccggctcgggcctctcca

SEQ ID NO: 2899 - DNA, 50 bp, Homo sapiens
ggtggagcaccccgcagttgtggcagtgccgcacggcctccagcacctgc

SEQ ID NO: 2900 - DNA, 23 bp, Homo sapiens
tgccgcacggcctccagcacctg

SEQ ID NO: 2901 - DNA, 23 bp, Homo sapiens
ccccgcagttgtggcagtgccgc

SEQ ID NO: 2902 - DNA, 30 bp, Homo sapiens
gagcttgagctcgccgcgattgaggtcgat

SEQ ID NO: 2903 - DNA, 23 bp, Homo sapiens
tgagctcgccgcgattgaggtcg

SEQ ID NO: 2904 - DNA, 22 bp, Homo sapiens
cgatgagcttgagctcgccgcg

SEQ ID NO: 2905 - DNA, 40 bp, Homo sapiens
tgtagacggtgtccttgagcagcgcccccgacccgaagtc

SEQ ID NO: 2906 - DNA, 22 bp, Homo sapiens
ttgagcagcgcccccgacccga

SEQ ID NO: 2907 - DNA, 41 bp, Homo sapiens
gctgctatttgctgggccccggcgacaggctgtggaggtgg

SEQ ID NO: 2908 - DNA, 22 bp, Homo sapiens
ccccggcgacaggctgtggagg

SEQ ID NO: 2909 - DNA, 22 bp, Homo sapiens
tttgctgggccccggcgacagg

SEQ ID NO: 2910 - DNA, 26 bp, Homo sapiens
gtccccccccaaccacctcttgctcc

SEQ ID NO: 2911 - DNA, 23 bp, Homo sapiens
cccccccaaccacctcttgctcc

SEQ ID NO: 2912 - DNA, 47 bp, Homo sapiens
cgccgtggagtcgttgcccgggaaaacgtcagccatggtcccccccc

SEQ ID NO: 2913 - DNA, 22 bp, Homo sapiens
acgtcagccatggtcccccccc

SEQ ID NO: 2914 - DNA, 22 bp, Homo sapiens
gcccgggaaaacgtcagccatg

SEQ ID NO: 2915 - DNA, 24 bp, Homo sapiens
cgtggagtcgttgcccgggaaaac

SEQ ID NO: 2916 - DNA, 35 bp, Homo sapiens
cctttgcgggcgaagcggttggccacgtcctgaga

SEQ ID NO: 2917 - DNA, 22 bp, Homo sapiens
gcgaagcggttggccacgtcct

SEQ ID NO: 2918 - DNA, 22 bp, Homo sapiens
cctttgcgggcgaagcggttgg

SEQ ID NO: 2919 - DNA, 30 bp, Homo sapiens
catccactggccggcatcttcatcagctcc

SEQ ID NO: 2920 - DNA, 22 bp, Homo sapiens
ggccggcatcttcatcagctcc

SEQ ID NO: 2921 - DNA, 25 bp, Homo sapiens
catcaaatggaggctgcccggcaag

SEQ ID NO: 2922 - DNA, 22 bp, Homo sapiens
tcaaatggaggctgcccggcaa

SEQ ID NO: 2923 - DNA, 30 bp, Homo sapiens
gcgcacggtgctctcctcgccctcgctcgg

SEQ ID NO: 2924 - DNA, 22 bp, Homo sapiens
tgctctcctcgccctcgctcgg

SEQ ID NO: 2925 - DNA, 23 bp, Homo sapiens
ggagccggagcccgagaggtgcc

SEQ ID NO: 2926 - DNA, 30 bp, Homo sapiens
cgcagccgggtcagccatcttgcgcgcggg

SEQ ID NO: 2927 - DNA, 22 bp, Homo sapiens
cgggtcagccatcttgcgcgcg

SEQ ID NO: 2928 - DNA, 36 bp, Homo sapiens
gggagcgggcaggtgtgggtggagggcagggctagc

SEQ ID NO: 2929 - DNA, 22 bp, Homo sapiens
ggtgtgggtggagggcagggct

SEQ ID NO: 2930 - DNA, 22 bp, Homo sapiens
gggagcgggcaggtgtgggtgg

SEQ ID NO: 2931 - DNA, 23 bp, Homo sapiens
cactcaggatacatggtcgcttt

SEQ ID NO: 2932 - DNA, 23 bp, Homo sapiens
cactcaggatacatggtcgcttt

SEQ ID NO: 2933 - DNA, 40 bp, Homo sapiens
actcagccttgccattgttcttcttgcagcgctcggccag

SEQ ID NO: 2934 - DNA, 22 bp, Homo sapiens
ttcttcttgcagcgctcggcca

SEQ ID NO: 2935 - DNA, 37 bp, Homo sapiens
cctgtttgatggctccgcggcggttcatcgttgggaa

SEQ ID NO: 2936 - DNA, 22 bp, Homo sapiens
tccgcggcggttcatcgttggg

SEQ ID NO: 2937 - DNA, 22 bp, Homo sapiens
cctgtttgatggctccgcggcg

SEQ ID NO: 2938 - DNA, 23 bp, Homo sapiens
gccgcggtgccagtgcatctgcc

SEQ ID NO: 2939 - DNA, 22 bp, Homo sapiens
gccgcggtgccagtgcatctgc

SEQ ID NO: 2940 - DNA, 31 bp, Homo sapiens
ccttgaagcggtgcggcatgtcgatgttgaa

SEQ ID NO: 2941 - DNA, 22 bp, Homo sapiens
gcggtgcggcatgtcgatgttg

SEQ ID NO: 2942 - DNA, 40 bp, Homo sapiens
gcttcaccagtccccagagcaggctgccgcagtggtcaca

SEQ ID NO: 2943 - DNA, 22 bp, Homo sapiens
tccccagagcaggctgccgcag

SEQ ID NO: 2944 - DNA, 27 bp, Homo sapiens
caccttcccgaagctgcctttgcccag

SEQ ID NO: 2945 - DNA, 22 bp, Homo sapiens
tcccgaagctgcctttgcccag

SEQ ID NO: 2946 - DNA, 26 bp, Homo sapiens
cagaaggtgctggcccggctctcccc

SEQ ID NO: 2947 - DNA, 22 bp, Homo sapiens
aggtgctggcccggctctcccc

SEQ ID NO: 2948 - DNA, 22 bp, Homo sapiens
ccgtttggccgatgcgcgagtc

SEQ ID NO: 2949 - DNA, 29 bp, Homo sapiens
ccaggccgggctgttggtcttctgcttgg

SEQ ID NO: 2950 - DNA, 22 bp, Homo sapiens
ggccgggctgttggtcttctgc

SEQ ID NO: 2951 - DNA, 22 bp, Homo sapiens
gaactcgtcgtgccaggccggg

SEQ ID NO: 2952 - DNA, 32 bp, Homo sapiens
cagtcctcgaagtggcggctcccgttctgcag

SEQ ID NO: 2953 - DNA, 22 bp, Homo sapiens
cctcgaagtggcggctcccgtt

SEQ ID NO: 2954 - DNA, 30 bp, Homo sapiens
cgcttcctcggccgcatgcgttccctgaac

SEQ ID NO: 2955 - DNA, 22 bp, Homo sapiens
tcctcggccgcatgcgttccct

SEQ ID NO: 2956 - DNA, 33 bp, Homo sapiens
gctcgtggcaccgcttgtggaccacgcaggtgc

SEQ ID NO: 2957 - DNA, 22 bp, Homo sapiens
ggcaccgcttgtggaccacgca

SEQ ID NO: 2958 - DNA, 41 bp, Homo sapiens
gggcatgttgacgctgaaccgctgggagcccacctggtcgg

SEQ ID NO: 2959 - DNA, 22 bp, Homo sapiens
cgctgggagcccacctggtcgg

SEQ ID NO: 2960 - DNA, 22 bp, Homo sapiens
gggcatgttgacgctgaaccgc

SEQ ID NO: 2961 - DNA, 22 bp, Homo sapiens
gcctggccttgccggacttcgc

SEQ ID NO: 2962 - DNA, 49 bp, Homo sapiens
gccatcatctcgtacatcagcacccccagggcccaccagtccacggagg

SEQ ID NO: 2963 - DNA, 22 bp, Homo sapiens
tcagcacccccagggcccacca

SEQ ID NO: 2964 - DNA, 22 bp, Homo sapiens
cccagggcccaccagtccacgg

SEQ ID NO: 2965 - DNA, 29 bp, Homo sapiens
ggcccatccgcacccgctcatacaattcc

SEQ ID NO: 2966 - DNA, 22 bp, Homo sapiens
ggcccatccgcacccgctcata

SEQ ID NO: 2967 - DNA, 22 bp, Homo sapiens
agccggcgctccacatcccctg

SEQ ID NO: 2968 - DNA, 27 bp, Homo sapiens
ccatccacgggcgccttgagcagctcc

SEQ ID NO: 2969 - DNA, 22 bp, Homo sapiens
ccatccacgggcgccttgagca

SEQ ID NO: 2970 - DNA, 28 bp, Homo sapiens
gccccccagcgccagcacacgtttctcc

SEQ ID NO: 2971 - DNA, 22 bp, Homo sapiens
gccccccagcgccagcacacgt

SEQ ID NO: 2972 - DNA, 26 bp, Homo sapiens
gccgcccgcgtgaagaacttgtcaaa

SEQ ID NO: 2973 - DNA, 22 bp, Homo sapiens
gccgcccgcgtgaagaacttgt

SEQ ID NO: 2974 - DNA, 24 bp, Homo sapiens
cgccgccgcctctacagccgcccg

SEQ ID NO: 2975 - DNA, 22 bp, Homo sapiens
ccgccgcctctacagccgcccg

SEQ ID NO: 2976 - DNA, 31 bp, Homo sapiens
gccgtccgccacctacctgccacctgcccgc

SEQ ID NO: 2977 - DNA, 22 bp, Homo sapiens
cacctacctgccacctgcccgc

SEQ ID NO: 2978 - DNA, 22 bp, Homo sapiens
gccgtccgccacctacctgcca

SEQ ID NO: 2979 - DNA, 57 bp, Homo sapiens
atggtgctgctgtccctctgggtcggcatctcctcactcccccgcctcaacgctgga

SEQ ID NO: 2980 - DNA, 22 bp, Homo sapiens
cactcccccgcctcaacgctgg

SEQ ID NO: 2981 - DNA, 23 bp, Homo sapiens
ggtcggcatctcctcactccccc

SEQ ID NO: 2982 - DNA, 23 bp, Homo sapiens
tgctgctgtccctctgggtcggc

SEQ ID NO: 2983 - DNA, 27 bp, Homo sapiens
ggaatggtccccgctgccgccgcctgc

SEQ ID NO: 2984 - DNA, 22 bp, Homo sapiens
ggtccccgctgccgccgcctgc

SEQ ID NO: 2985 - DNA, 28 bp, Homo sapiens
acccaagggtcgcctcgccggagcagcc

SEQ ID NO: 2986 - DNA, 22 bp, Homo sapiens
gggtcgcctcgccggagcagcc

SEQ ID NO: 2987 - DNA, 28 bp, Homo sapiens
gccacctgcccgcagcgccgacccaagg

SEQ ID NO: 2988 - DNA, 22 bp, Homo sapiens
tgcccgcagcgccgacccaagg

SEQ ID NO: 2989 - DNA, 24 bp, Homo sapiens
gccgcctgcgcttgccggagaacc

SEQ ID NO: 2990 - DNA, 22 bp, Homo sapiens
cgcctgcgcttgccggagaacc

SEQ ID NO: 2991 - DNA, 29 bp, Homo sapiens
gccgcctgcgaccgtgtgggacatggtgc

SEQ ID NO: 2992 - DNA, 22 bp, Homo sapiens
gccgcctgcgaccgtgtgggac

SEQ ID NO: 2993 - DNA, 61 bp, Homo sapiens
gggagggcgaggaggaggaggagggcgaggagaagggcgaggaggaggagagaaggaattc

SEQ ID NO: 2994 - DNA, 25 bp, Homo sapiens
gcgaggaggaggagagaaggaattc

SEQ ID NO: 2995 - DNA, 22 bp, Homo sapiens
ggcgaggagaagggcgaggagg

SEQ ID NO: 2996 - DNA, 24 bp, Homo sapiens
gggcgaggaggaggaggagggcga

SEQ ID NO: 2997 - DNA, 42 bp, Homo sapiens
gctcaggccgatctgcagatggaacgagatgcccccgaccgg

SEQ ID NO: 2998 - DNA, 22 bp, Homo sapiens
ggaacgagatgcccccgaccgg

SEQ ID NO: 2999 - DNA, 33 bp, Homo sapiens
gagagccttctccgcctcacaccgctgcaattg

SEQ ID NO: 3000 - DNA, 22 bp, Homo sapiens
tctccgcctcacaccgctgcaa

SEQ ID NO: 3001 - DNA, 25 bp, Homo sapiens
caagccctgcctgaaaagccccttc

SEQ ID NO: 3002 - DNA, 22 bp, Homo sapiens
caagccctgcctgaaaagcccc

SEQ ID NO: 3003 - DNA, 31 bp, Homo sapiens
gggctggcggcgcggcagcaggaaagttttg

SEQ ID NO: 3004 - DNA, 22 bp, Homo sapiens
ctggcggcgcggcagcaggaaa

SEQ ID NO: 3005 - DNA, 29 bp, Homo sapiens
ccgccacgggcagcagcggactgggcggc

SEQ ID NO: 3006 - DNA, 22 bp, Homo sapiens
cgggcagcagcggactgggcgg

SEQ ID NO: 3007 - DNA, 28 bp, Homo sapiens
ccggaccctgggaccagtgcggcggccg

SEQ ID NO: 3008 - DNA, 22 bp, Homo sapiens
ccctgggaccagtgcggcggcc

SEQ ID NO: 3009 - DNA, 22 bp, Homo sapiens
gccgcgacaggagccaagaacg

SEQ ID NO: 3010 - DNA, 23 bp, Homo sapiens
gccgtttccgcagcgtgtccttg

SEQ ID NO: 3011 - DNA, 39 bp, Homo sapiens
gcatcacacttgagtccttgccgtgccagtccccacagc

SEQ ID NO: 3012 - DNA, 22 bp, Homo sapiens
ccttgccgtgccagtccccaca

SEQ ID NO: 3013 - DNA, 42 bp, Homo sapiens
ggtgctggcggatgtctcccctcacgcccagcctcttctcag

SEQ ID NO: 3014 - DNA, 22 bp, Homo sapiens
cggatgtctcccctcacgccca

SEQ ID NO: 3015 - DNA, 23 bp, Homo sapiens
cccctcacgcccagcctcttctc

SEQ ID NO: 3016 - DNA, 22 bp, Homo sapiens
tgctggcggatgtctcccctca

SEQ ID NO: 3017 - DNA, 30 bp, Homo sapiens
ccgaaacaaagggtgctggcggatgtctcc

SEQ ID NO: 3018 - DNA, 22 bp, Homo sapiens
cgaaacaaagggtgctggcgga

SEQ ID NO: 3019 - DNA, 22 bp, Homo sapiens
cgacatggttgcgccctggagc

SEQ ID NO: 3020 - DNA, 25 bp, Homo sapiens
gcttgatggcaccccggcgctgatg

SEQ ID NO: 3021 - DNA, 22 bp, Homo sapiens
gcttgatggcaccccggcgctg

SEQ ID NO: 3022 - DNA, 20 bp, Homo sapiens
gggtcggtcctgctgggcat

SEQ ID NO: 3023 - DNA, 25 bp, Homo sapiens
cggccgccgctcccttccatcttgg

SEQ ID NO: 3024 - DNA, 22 bp, Homo sapiens
cggccgccgctcccttccatct

SEQ ID NO: 3025 - DNA, 47 bp, Homo sapiens
cgtccacgctggtgatgaagatgtcccccccgtaatgcgccttgagg

SEQ ID NO: 3026 - DNA, 23 bp, Homo sapiens
gtcccccccgtaatgcgccttga

SEQ ID NO: 3027 - DNA, 22 bp, Homo sapiens
ggtgatgaagatgtcccccccg

SEQ ID NO: 3028 - DNA, 27 bp, Homo sapiens
agctcctcgaaggtcgtggcggcgtcc

SEQ ID NO: 3029 - DNA, 22 bp, Homo sapiens
ctcctcgaaggtcgtggcggcg

SEQ ID NO: 3030 - DNA, 27 bp, Homo sapiens
cctgcactgacgggccaggcggaaagc

SEQ ID NO: 3031 - DNA, 22 bp, Homo sapiens
tgcactgacgggccaggcggaa

SEQ ID NO: 3032 - DNA, 30 bp, Homo sapiens
gtcttctcccggacatggcaggccaggctg

SEQ ID NO: 3033 - DNA, 22 bp, Homo sapiens
tcccggacatggcaggccaggc

SEQ ID NO: 3034 - DNA, 32 bp, Homo sapiens
catcttctggctccccggcggtagatagattt

SEQ ID NO: 3035 - DNA, 22 bp, Homo sapiens
catcttctggctccccggcggt

SEQ ID NO: 3036 - DNA, 22 bp, Homo sapiens
cgtggcagcgcttatggaccag

SEQ ID NO: 3037 - DNA, 23 bp, Homo sapiens
gggacgaggccgtggcagcgctt

SEQ ID NO: 3038 - DNA, 28 bp, Homo sapiens
gcttcctgcaggtcagcgggacgaggcc

SEQ ID NO: 3039 - DNA, 22 bp, Homo sapiens
tgcaggtcagcgggacgaggcc

SEQ ID NO: 3040 - DNA, 30 bp, Homo sapiens
cgtacgtcccgcgcccgatgactctgatta

SEQ ID NO: 3041 - DNA, 22 bp, Homo sapiens
cgtcccgcgcccgatgactctg

SEQ ID NO: 3042 - DNA, 39 bp, Homo sapiens
atctcaaacatgaggactcccagcgcccaccagtccacg

SEQ ID NO: 3043 - DNA, 22 bp, Homo sapiens
tcccagcgcccaccagtccacg

SEQ ID NO: 3044 - DNA, 26 bp, Homo sapiens
ggagcgcccggccatcatctcaaaca

SEQ ID NO: 3045 - DNA, 22 bp, Homo sapiens
ggagcgcccggccatcatctca

SEQ ID NO: 3046 - DNA, 35 bp, Homo sapiens
accgttcaacacagaaaccccagaatcgcttcctc

SEQ ID NO: 3047 - DNA, 22 bp, Homo sapiens
gaaaccccagaatcgcttcctc

SEQ ID NO: 3048 - DNA, 32 bp, Homo sapiens
gctgaagcccacaatgcccgttcaagtcccct

SEQ ID NO: 3049 - DNA, 22 bp, Homo sapiens
aagcccactaagcccgttcaag

SEQ ID NO: 3050 - DNA, 30 bp, Homo sapiens
gaactcctcccaactcggctcaaagacggg

SEQ ID NO: 3051 - DNA, 22 bp, Homo sapiens
tcccaactcggctcaaagacgg

SEQ ID NO: 3052 - DNA, 31 bp, Homo sapiens
ggcagaatctttctccgcccatccttcaccg

SEQ ID NO: 3053 - DNA, 22 bp, Homo sapiens
tttctccgcccatccttcaccg

SEQ ID NO: 3054 - DNA, 23 bp, Homo sapiens
ggcagccagccccacatctaagc

SEQ ID NO: 3055 - DNA, 22 bp, Homo sapiens
gcagccagccccacatctaagc

SEQ ID NO: 3056 - DNA, 43 bp, Homo sapiens
cgcccagtccgttctctccatgcccgtgctgctgctacctgtg

SEQ ID NO: 3057 - DNA, 22 bp, Homo sapiens
gcccgtgctgctgctacctgtg

SEQ ID NO: 3058 - DNA, 28 bp, Homo sapiens
aaacgtccgcccagtccgttctctccat

SEQ ID NO: 3059 - DNA, 22 bp, Homo sapiens
tccgcccagtccgttctctcca

SEQ ID NO: 3060 - DNA, 52 bp, Homo sapiens
gtctctagcctgggccttcgagaccgcatacaaagagggcaaaggaatttta

SEQ ID NO: 3061 - DNA, 22 bp, Homo sapiens
ccgcatacaaagagggcaaagg

SEQ ID NO: 3062 - DNA, 22 bp, Homo sapiens
agcctgggccttcgagaccgca

SEQ ID NO: 3063 - DNA, 39 bp, Homo sapiens
ttcagttttttctcgagccgcctgttccaccatacgctg

SEQ ID NO: 3064 - DNA, 22 bp, Homo sapiens
gccgcctgttccaccatacgct

SEQ ID NO: 3065 - DNA, 27 bp, Homo sapiens
ggtggtgctggacctgggctaactggc

SEQ ID NO: 3066 - DNA, 22 bp, Homo sapiens
tgctggacctgggctaactggc

SEQ ID NO: 3067 - DNA, 27 bp, Homo sapiens
gggcactctggcggtggcacgaactcc

SEQ ID NO: 3068 - DNA, 22 bp, Homo sapiens
gggcactctggcggtggcacga

SEQ ID NO: 3069 - DNA, 30 bp, Homo sapiens
ccagtccttgggcggccgaattttgcagat

SEQ ID NO: 3070 - DNA, 22 bp, Homo sapiens
ccttgggcggccgaattttgca

SEQ ID NO: 3071 - DNA, 34 bp, Homo sapiens
aaataatttcaacgtcccctgagaaaaaccggaa

SEQ ID NO: 3072 - DNA, 22 bp, Homo sapiens
cgtcccctgagaaaaaccggaa

SEQ ID NO: 3073 - DNA, 38 bp, Homo sapiens
aggcaggtcctccgggccgctgtcctgctctgggtcct

SEQ ID NO: 3074 - DNA, 22 bp, Homo sapiens
gccgctgtcctgctctgggtcc

SEQ ID NO: 3075 - DNA, 41 bp, Homo sapiens
tatccgtgcactcctttgctgaccgcttccgggtgttcgag

SEQ ID NO: 3076 - DNA, 22 bp, Homo sapiens
tcctgttctgacctcgcctggg

SEQ ID NO: 3077 - DNA, 31 bp, Homo sapiens
cttctgggtctggaaggcagtggttgcttgt

SEQ ID NO: 3078 - DNA, 22 bp, Homo sapiens
gggtctggaaggctgaggttgc

SEQ ID NO: 3079 - DNA, 31 bp, Homo sapiens
gggcacgccccgtcctctcccgactcccgtt

SEQ ID NO: 3080 - DNA, 22 bp, Homo sapiens
ggcacgccccgtcctctcccga

SEQ ID NO: 3081 - DNA, 23 bp, Homo sapiens
ggggaggaccaggcgcgcgcagc

SEQ ID NO: 3082 - DNA, 22 bp, Homo sapiens
gggaggacgacgcgcgcgcacg

SEQ ID NO: 3083 - DNA, 37 bp, Homo sapiens
tgtggccatcataacctcaagagcgcacgccaataaa

SEQ ID NO: 3084 - DNA, 22 bp, Homo sapiens
caacctcaagagcgcacgccaa

SEQ ID NO: 3085 - DNA, 22 bp, Homo sapiens
gggcctggtggaagcatactgc

SEQ ID NO: 3086 - DNA, 25 bp, Homo sapiens
cgggtgacaggcggcggcggcggcg

SEQ ID NO: 3087 - DNA, 22 bp, Homo sapiens
cgggtgacaggcggcggcggcg

SEQ ID NO: 3088 - DNA, 42 bp, Homo sapiens
ggtcaacccctcaagccgtccgccgacgcccactgtggtgtg

SEQ ID NO: 3089 - DNA, 22 bp, Homo sapiens
tccgccgacgcccactgtggtg

SEQ ID NO: 3090 - DNA, 22 bp, Homo sapiens
ccctcaagccgtccgccgacgc

SEQ ID NO: 3091 - DNA, 43 bp, Homo sapiens
tctcaccgtcctacacgcccagccagccaaagcctccccacct

SEQ ID NO: 3092 - DNA, 22 bp, Homo sapiens
cgcccagccagccaaagcctcc

SEQ ID NO: 3093 - DNA, 37 bp, Homo sapiens
gccgccgctgcctgcaaagtcccggccacggaattcc

SEQ ID NO: 3094 - DNA, 21 bp, Homo sapiens
aagtcccggccacggaattcc

SEQ ID NO: 3095 - DNA, 22 bp, Homo sapiens
cctgcaaagtcccggccacgga

SEQ ID NO: 3096 - DNA, 22 bp, Homo sapiens
cgccgctgcctgcaaagtcccg

SEQ ID NO: 3097 - DNA, 24 bp, Homo sapiens
cgctccgcccccggccgccgctgc

SEQ ID NO: 3098 - DNA, 21 bp, Homo sapiens
gctccgcccccggccgccgct

SEQ ID NO: 3099 - DNA, 22 bp, Homo sapiens
gctcgatcccgctccgcccccg

SEQ ID NO: 3100 - DNA, 27 bp, Homo sapiens
ccccggccaaggccatgacgctcacgg

SEQ ID NO: 3101 - DNA, 22 bp, Homo sapiens
ccccggccaaggccatgacgct

SEQ ID NO: 3102 - DNA, 40 bp, Homo sapiens
cgaggagtcgagcagccgcagcgcgccggccccgagcagg

SEQ ID NO: 3103 - DNA, 22 bp, Homo sapiens
gcagcgcgccggccccgagcag

SEQ ID NO: 3104 - DNA, 22 bp, Homo sapiens
agtcgagcagccgcagcgcgcc

SEQ ID NO: 3105 - DNA, 23 bp, Homo sapiens
tgggaggacggccagggacaggg

SEQ ID NO: 3106 - DNA, 22 bp, Homo sapiens
gggaggacggccagggacaggg

SEQ ID NO: 3107 - DNA, 45 bp, Homo sapiens
ggccgaaagtgcagttagagcccccccacgcgcagagatggactc

SEQ ID NO: 3108 - DNA, 22 bp, Homo sapiens
gcccccccacgcgcagagatgg

SEQ ID NO: 3109 - DNA, 38 bp, Homo sapiens
gagcaattctccttcgtcccctcggagattttaattct

SEQ ID NO: 3110 - DNA, 22 bp, Homo sapiens
gcaattctccttcgtcccctcg

SEQ ID NO: 3111 - DNA, 22 bp, Homo sapiens
ccttcgtcccctcggagatttt

SEQ ID NO: 3112 - DNA, 31 bp, Homo sapiens
gaggtcgtccccgttttgacttctgcctctc

SEQ ID NO: 3113 - DNA, 22 bp, Homo sapiens
cgtccccgttttgacttctgcc

SEQ ID NO: 3114 - DNA, 45 bp, Homo sapiens
caaatctacttcatggcaaaccaaggtttcaggcccgatcagagg

SEQ ID NO: 3115 - DNA, 22 bp, Homo sapiens
gcaaaccaaggtttcaggcccg

SEQ ID NO: 3116 - DNA, 45 bp, Homo sapiens
gttatgttggactacaggaggtagggcaggtggaatagaaacaag

SEQ ID NO: 3117 - DNA, 22 bp, Homo sapiens
acaggaggtagggcaggtggaa

SEQ ID NO: 3118 - DNA, 46 bp, Homo sapiens
ctgatgaagcagatgacatggaggctcccgcatgagacacttccct

SEQ ID NO: 3119 - DNA, 22 bp, Homo sapiens
tggaggctcccgcatgagacac

SEQ ID NO: 3120 - DNA, 22 bp, Homo sapiens
agatgacatggaggctcccgca

SEQ ID NO: 3121 - DNA, 62 bp, Homo sapiens
ctgtcctgagctcatccccgtcttccgccaccgctccctttttcccacgcttcggcattccc

SEQ ID NO: 3122 - DNA, 22 bp, Homo sapiens
tttcccacgcttcggcattccc

SEQ ID NO: 3123 - DNA, 22 bp, Homo sapiens
ccgccaccgctccctttttccc

SEQ ID NO: 3124 - DNA, 22 bp, Homo sapiens
ccccgtcttccgccaccgctcc

SEQ ID NO: 3125 - DNA, 34 bp, Homo sapiens
cctgatcatgctcctcgtcgcctatgccgtaaga

SEQ ID NO: 3126 - DNA, 22 bp, Homo sapiens
tgctcctcgtcgcctatgccgt

SEQ ID NO: 3127 - DNA, 29 bp, Homo sapiens
gcccgatggcagcctagctcctcctaacg

SEQ ID NO: 3128 - DNA, 22 bp, Homo sapiens
ggcagcctagctcctcctaacg

SEQ ID NO: 3129 - DNA, 24 bp, Homo sapiens
cgtatctgcaccggcccgatggca

SEQ ID NO: 3130 - DNA, 22 bp, Homo sapiens
tatctgcaccggcccgatggca

SEQ ID NO: 3131 - DNA, 31 bp, Homo sapiens
ggaaagcaggcccacgccactgtacccttcc

SEQ ID NO: 3132 - DNA, 22 bp, Homo sapiens
gcaggcccacgccactgtaccc

SEQ ID NO: 3133 - DNA, 41 bp, Homo sapiens
gccgtaagaaactttgagtgggcactggcgggaaagcaggc

SEQ ID NO: 3134 - DNA, 22 bp, Homo sapiens
gggcactggcgggaaagcaggc

SEQ ID NO: 3135 - DNA, 49 bp, Homo sapiens
caggaacttgcgaaaggcttcatcccagcgctgccggtactccagtcgt

SEQ ID NO: 3136 - DNA, 22 bp, Homo sapiens
ggcttcatcccagcgctgccgg

SEQ ID NO: 3137 - DNA, 22 bp, Homo sapiens
gcgaaaggcttcatcccagcgc

SEQ ID NO: 3138 - DNA, 42 bp, Homo sapiens
acagcctgcagtaattccccgaagccttggcgctcttgtggc

SEQ ID NO: 3139 - DNA, 22 bp, Homo sapiens
ccccgaagccttggcgctcttg

SEQ ID NO: 3140 - DNA, 40 bp, Homo sapiens
acagtgatcactgccgagggccttggaacggatcttgctg

SEQ ID NO: 3141 - DNA, 22 bp, Homo sapiens
gggccttggaacggatcttgct

SEQ ID NO: 3142 - DNA, 22 bp, Homo sapiens
cactgccgagggccttggaacg

SEQ ID NO: 3143 - DNA, 30 bp, Homo sapiens
ggcctcctccttcttcccgccctccgctgg

SEQ ID NO: 3144 - DNA, 22 bp, Homo sapiens
ccttcttcccgccctccgctgg

SEQ ID NO: 3145 - DNA, 36 bp, Homo sapiens
ggaggccatggctccgctccccgcaccttcccgcag

SEQ ID NO: 3146 - DNA, 22 bp, Homo sapiens
ccgctccccgcaccttcccgca

SEQ ID NO: 3147 - DNA, 36 bp, Homo sapiens
tctgtgctgtgctcccctggaatgctgcctgctgat

SEQ ID NO: 3148 - DNA, 22 bp, Homo sapiens
cccctggaatgctgcctgctga

SEQ ID NO: 3149 - DNA, 26 bp, Homo sapiens
  misc_feature 19: n= a, c, g, or t
gggcccccagtcccccgancacccta

SEQ ID NO: 3150 - DNA, 22 bp, Homo sapiens
  misc_feature 17: n= a, c, g, or t
gcccccagtcccccgancaccc

SEQ ID NO: 3151 - DNA, 30 bp, Homo sapiens
ctcagtgggtttgtattgcctgagcgtggg

SEQ ID NO: 3152 - DNA, 22 bp, Homo sapiens
gtttgtattgcctgagcgtggg

SEQ ID NO: 3153 - DNA, 36 bp, Homo sapiens
  misc_feature 11: n= a, c, g, or t
aggtgtgagcncctgcgcctggcctctgagttgtct

SEQ ID NO: 3154 - DNA, 22 bp, Homo sapiens
cctgcgcctggcctctgagttg

SEQ ID NO: 3155 - DNA, 30 bp, Homo sapiens
cgacccccgcggcggagtagaaggcggcgg

SEQ ID NO: 3156 - DNA, 22 bp, Homo sapiens
gcggcggagtagaaggcggcgg

SEQ ID NO: 3157 - DNA, 30 bp, Homo sapiens
cgcctctccgccctcagcctcctcctcacg

SEQ ID NO: 3158 - DNA, 22 bp, Homo sapiens
cgcctctccgccctcagcctcc

SEQ ID NO: 3159 - DNA, 51 bp, Homo sapiens
cataattcatgttaggcttgttcttgcgaatcccccagagacgagccacct

SEQ ID NO: 3160 - DNA, 22 bp, Homo sapiens
gcgaatcccccagagacgagcc

SEQ ID NO: 3161 - DNA, 37 bp, Homo sapiens
gggtatggacgaaatgggtggtgtggtggcaaaagca

SEQ ID NO: 3162 - DNA, 22 bp, Homo sapiens
tgggtggtgtggtggcaaaagc

SEQ ID NO: 3163 - DNA, 20 bp, Homo sapiens
agaacccgctgccgagagag

SEQ ID NO: 3164 - DNA, 22 bp, Homo sapiens
tccccaaagaacccgctgccga

SEQ ID NO: 3165 - DNA, 41 bp, Homo sapiens
gcaaaggccccgttcacattctgctgccgccatcgctcccg

SEQ ID NO: 3166 - DNA, 22 bp, Homo sapiens
tctgctgccgccatcgctcccg

SEQ ID NO: 3167 - DNA, 49 bp, Homo sapiens
gcgcgccgccccctcccccacctccacccccaccagcccccaccacagg

SEQ ID NO: 3168 - DNA, 22 bp, Homo sapiens
ccacccccaccagcccccacca

SEQ ID NO: 3169 - DNA, 26 bp, Homo sapiens
cggctccatcggcggcaggcagcatg

SEQ ID NO: 3170 - DNA, 22 bp, Homo sapiens
cggctccatcggcggcaggcag

SEQ ID NO: 3171 - DNA, 59 bp, Homo sapiens
attctcaccccacctgccctgaagcccaccatcccagcagcctaagaacgccctcctgg

SEQ ID NO: 3172 - DNA, 22 bp, Homo sapiens
cccacctgccctgaagcccacc

SEQ ID NO: 3173 - DNA, 41 bp, Homo sapiens
gaaggatttgggactgagggaagagggaagaccgtgccgtc

SEQ ID NO: 3174 - DNA, 22 bp, Homo sapiens
gggaagagggaagaccgtgccg

SEQ ID NO: 3175 - DNA, 48 bp, Homo sapiens
gtacggagagaagggcatcaagctgcggacgatgcgggacttgggaaa

SEQ ID NO: 3176 - DNA, 22 bp, Homo sapiens
tgcggacgatgcgggacttggg

SEQ ID NO: 3177 - DNA, 22 bp, Homo sapiens
gggcatcaagctgcggacgatg

SEQ ID NO: 3178 - DNA, 42 bp, Homo sapiens
tatgaattctgttggcgggtgctggaaggccgggctgtggaa

SEQ ID NO: 3179 - DNA, 22 bp, Homo sapiens
tgctggaaggccgggctgtgga

SEQ ID NO: 3180 - DNA, 23 bp, Homo sapiens
tctgttggcgggtgctggaaggc

SEQ ID NO: 3181 - DNA, 42 bp, Homo sapiens
cttcgccttgcgtgaggtttgccagccgggacacccagttaa

SEQ ID NO: 3182 - DNA, 22 bp, Homo sapiens
ggtttgccagccgggacaccca

SEQ ID NO: 3183 - DNA, 22 bp, Homo sapiens
tgcgtgaggtttgccagccggg

SEQ ID NO: 3184 - DNA, 23 bp, Homo sapiens
gggagaggctgggcggagttggg

SEQ ID NO: 3185 - DNA, 33 bp, Homo sapiens
ggttcaggaactcctcaagctggcggccaacca

SEQ ID NO: 3186 - DNA, 23 bp, Homo sapiens
ggaactcctcaagctggcggcca

SEQ ID NO: 3187 - DNA, 38 bp, Homo sapiens
tctatgatgctggacgcgcggctgaagtggtcctgcat

SEQ ID NO: 3188 - DNA, 22 bp, Homo sapiens
gctggacgcgcggctgaagtgg

SEQ ID NO: 3189 - DNA, 23 bp, Homo sapiens
cgcgcggctgaagtggtcctgca

SEQ ID NO: 3190 - DNA, 38 bp, Homo sapiens
acactggtccttcatccgcaggcagcccgtggagttgt

SEQ ID NO: 3191 - DNA, 23 bp, Homo sapiens
ccgcaggcagcccgtggagttgt

SEQ ID NO: 3192 - DNA, 22 bp, Homo sapiens
tccttcatccgcaggcagcccg

SEQ ID NO: 3193 - DNA, 39 bp, Homo sapiens
ggattcgtcgagctcccgccgcagcttagcctgggaggg

SEQ ID NO: 3194 - DNA, 22 bp, Homo sapiens
tcccgccgcagcttagcctggg

SEQ ID NO: 3195 - DNA, 22 bp, Homo sapiens
ttcgtcgagctcccgccgcagc

SEQ ID NO: 3196 - DNA, 31 bp, Homo sapiens
aagtgtgggaagccaccgtggtgacccgcag

SEQ ID NO: 3197 - DNA, 22 bp, Homo sapiens
ggaagccaccgtggtgacccgc

SEQ ID NO: 3198 - DNA, 38 bp, Homo sapiens
tgggtgtgagagtggtgttgctgctgctggtctgcccc

SEQ ID NO: 3199 - DNA, 22 bp, Homo sapiens
gttgctgctgctggtctgcccc

SEQ ID NO: 3200 - DNA, 29 bp, Homo sapiens
gggttgggcatctgggctgttttctcctt

SEQ ID NO: 3201 - DNA, 22 bp, Homo sapiens
gggttgggcatctgggctgttt

SEQ ID NO: 3202 - DNA, 47 bp, Homo sapiens
atgctgtttctttttgccaggatcccccgagccccttccttcactgt

SEQ ID NO: 3203 - DNA, 22 bp, Homo sapiens
tcccccgagccccttccttcac

SEQ ID NO: 3204 - DNA, 22 bp, Homo sapiens
ttgccaggatcccccgagcccc

SEQ ID NO: 3205 - DNA, 28 bp, Homo sapiens
caggtgcatgcttcccgccgggtcctcc

SEQ ID NO: 3206 - DNA, 22 bp, Homo sapiens
catgcttcccgccgggtcctcc

SEQ ID NO: 3207 - DNA, 26 bp, Homo sapiens
gccccgggtgcctgatctcagaagcc

SEQ ID NO: 3208 - DNA, 22 bp, Homo sapiens
gccccgggtgcctgatctcaga

SEQ ID NO: 3209 - DNA, 31 bp, Homo sapiens
gcggccgcctcctcctcgtcgtcgcccggcg

SEQ ID NO: 3210 - DNA, 23 bp, Homo sapiens
cgcctcctcctcgtcgtcgcccg

SEQ ID NO: 3211 - DNA, 31 bp, Homo sapiens
gctccacctgccgcaacttgaccaagtgtga

SEQ ID NO: 3212 - DNA, 22 bp, Homo sapiens
tccacctgccgcaacttgacca

SEQ ID NO: 3213 - DNA, 33 bp, Homo sapiens
gccatcgccgctgccgctgccgcctcctcctcc

SEQ ID NO: 3214 - DNA, 22 bp, Homo sapiens
gccgctgccgctgccgcctcct

SEQ ID NO: 3215 - DNA, 23 bp, Homo sapiens
cgcggtggctcggaggaggctgt

SEQ ID NO: 3216 - DNA, 22 bp, Homo sapiens
cgcggtggctcggaggaggctg

SEQ ID NO: 3217 - DNA, 41 bp, Homo sapiens
gccaacctgcccagtccctcctccggcagccacgttgttta

SEQ ID NO: 3218 - DNA, 22 bp, Homo sapiens
acctgcccagtccctcctccgg

SEQ ID NO: 3219 - DNA, 22 bp, Homo sapiens
ccctcctccggcagccacgttg

SEQ ID NO: 3220 - DNA, 30 bp, Homo sapiens
gctctgccgctcgccctcctcctcatctga

SEQ ID NO: 3221 - DNA, 22 bp, Homo sapiens
gctctgccgctcgccctcctcc

SEQ ID NO: 3222 - DNA, 35 bp, Homo sapiens
gtcatcttcttgcggttgcccttctggatgcccca

SEQ ID NO: 3223 - DNA, 23 bp, Homo sapiens
gcggttgcccttctggatgcccc

SEQ ID NO: 3224 - DNA, 39 bp, Homo sapiens
caccttcttgacctcgcccgtcttgccgtagttgcgcag

SEQ ID NO: 3225 - DNA, 23 bp, Homo sapiens
cgcccgtcttgccgtagttgcgc

SEQ ID NO: 3226 - DNA, 35 bp, Homo sapiens
gagtcctggagggaggcgaagcgggatgtggaggg

SEQ ID NO: 3227 - DNA, 22 bp, Homo sapiens
gggaggcgaagcgggatgtgga

SEQ ID NO: 3228 - DNA, 25 bp, Homo sapiens
agggccagcacaagttcctgatttt

SEQ ID NO: 3229 - DNA, 42 bp, Homo sapiens
agatgctgtccttcatgtcgccgctgcggagcaggtccaaca

SEQ ID NO: 3230 - DNA, 22 bp, Homo sapiens
tcgccgctgcggagcaggtcca

SEQ ID NO: 3231 - DNA, 37 bp, Homo sapiens
tggatgccccagcggtgcgccagcgcctccttgtgct

SEQ ID NO: 3232 - DNA, 22 bp, Homo sapiens
cggtgcgccagcgcctccttgt

SEQ ID NO: 3233 - DNA, 22 bp, Homo sapiens
atgccccagcggtgcgccagcg

SEQ ID NO: 3234 - DNA, 27 bp, Homo sapiens
gcagcgcgcgcgccatcttctggtagg

SEQ ID NO: 3235 - DNA, 22 bp, Homo sapiens
gcagcgcgcgcgccatcttctg

SEQ ID NO: 3236 - DNA, 34 bp, Homo sapiens
ggagcgtcctccctgtgtccgggccgggcgaggg

SEQ ID NO: 3237 - DNA, 22 bp, Homo sapiens
cctgtgtccgggccgggcgagg

SEQ ID NO: 3238 - DNA, 22 bp, Homo sapiens
ggagcgtcctccctgtgtccgg

SEQ ID NO: 3239 - DNA, 25 bp, Homo sapiens
ggagcccggcccgccacagtcctgc

SEQ ID NO: 3240 - DNA, 22 bp, Homo sapiens
gcccggcccgccacagtcctgc

SEQ ID NO: 3241 - DNA, 51 bp, Homo sapiens
agcttctggtaggtcatgcgcttgcggttccccttctgctggccccagcgg

SEQ ID NO: 3242 - DNA, 21 bp, Homo sapiens
gcggttccccttctgctgccc

SEQ ID NO: 3243 - DNA, 22 bp, Homo sapiens
ggtcatgcgcttgcggttcccc

SEQ ID NO: 3244 - DNA, 27 bp, Homo sapiens
ccggtcttggcgtagtttcggagggcg

SEQ ID NO: 3245 - DNA, 25 bp, Homo sapiens
cggtcttggcgtagtttcggagggc

SEQ ID NO: 3246 - DNA, 30 bp, Homo sapiens
gagtccctgcctcggatcccttcccctcgg

SEQ ID NO: 3247 - DNA, 22 bp, Homo sapiens
ccctgcctcggatcccttcccc

SEQ ID NO: 3248 - DNA, 32 bp, Homo sapiens
gcatgtccccgcgcgtcagtagccccagcagg

SEQ ID NO: 3249 - DNA, 22 bp, Homo sapiens
tccccgcgcgtcagtagcccca

SEQ ID NO: 3250 - DNA, 28 bp, Homo sapiens
ccggcgcctggctccacccaccacacgc

SEQ ID NO: 3251 - DNA, 22 bp, Homo sapiens
cggcgcctggctccacccacca

SEQ ID NO: 3252 - DNA, 41 bp, Homo sapiens
cctttgctggccccagcggcgcgccaggagttccttgtgct

SEQ ID NO: 3253 - DNA, 22 bp, Homo sapiens
ccccagcggcgcgccaggagtt

SEQ ID NO: 3254 - DNA, 32 bp, Homo sapiens
gtagtttcggagggcgcgcgccagcttctggt

SEQ ID NO: 3255 - DNA, 24 bp, Homo sapiens
ttcggagggcgcgcgccagcttct

SEQ ID NO: 3256 - DNA, 28 bp, Homo sapiens
ggtgtgctcaggcccggcggactgcagg

SEQ ID NO: 3257 - DNA, 22 bp, Homo sapiens
tgctcaggcccggcggactgca

SEQ ID NO: 3258 - DNA, 32 bp, Homo sapiens
gacgtgaggtcccccagcggctccgcaggtgg

SEQ ID NO: 3259 - DNA, 22 bp, Homo sapiens
gaggtcccccagcggctccgca

SEQ ID NO: 3260 - DNA, 25 bp, Homo sapiens
ggagccgccgcagccgccgccatcg

SEQ ID NO: 3261 - DNA, 22 bp, Homo sapiens
ggagccgccgcagccgccgcca

SEQ ID NO: 3262 - DNA, 22 bp, Homo sapiens
gggtggttgccgccgctgcctc

SEQ ID NO: 3263 - DNA, 22 bp, Homo sapiens
gggtggttgccgccgctgccgc

SEQ ID NO: 3264 - DNA, 28 bp, Homo sapiens
gagtcgccctcgctgccgctgtagaggg

SEQ ID NO: 3265 - DNA, 22 bp, Homo sapiens
tcgccctcgctgccgctgtaga

SEQ ID NO: 3266 - DNA, 32 bp, Homo sapiens
gatctccatctcgctcaggctccgcttcaggc

SEQ ID NO: 3267 - DNA, 22 bp, Homo sapiens
tcgctcaggctccgcttcaggc

SEQ ID NO: 3268 - DNA, 45 bp, Homo sapiens
gtgaggtctgtgctgctgtcacgggagggagacgcttgctgtggg

SEQ ID NO: 3269 - DNA, 22 bp, Homo sapiens
cacgggagggagacgcttgctg

SEQ ID NO: 3270 - DNA, 45 bp, Homo sapiens
ctcagtcctgtggctgcccgttcctcctccccgcctccctcctgc

SEQ ID NO: 3271 - DNA, 22 bp, Homo sapiens
ggctgcccgttcctcctccccg

SEQ ID NO: 3272 - DNA, 36 bp, Homo sapiens
gggaggctgagggaggacgggtggaggcaggcaggc

SEQ ID NO: 3273 - DNA, 22 bp, Homo sapiens
ggacgggtggaggcaggcaggc

SEQ ID NO: 3274 - DNA, 22 bp, Homo sapiens
ggaggctgagggaggacgggtg

SEQ ID NO: 3275 - DNA, 22 bp, Homo sapiens
gcaaggaggctggcaagagggc

SEQ ID NO: 3276 - DNA, 26 bp, Homo sapiens
gggagcggcaaggcagggcaggcggc

SEQ ID NO: 3277 - DNA, 22 bp, Homo sapiens
gcggcaaggcagggcaggcggc

SEQ ID NO: 3278 - DNA, 44 bp, Homo sapiens
cagttgcctctgcctgacgccctcccaccccaaccccgacattt

SEQ ID NO: 3279 - DNA, 22 bp, Homo sapiens
tctgcctgacgccctcccaccc

SEQ ID NO: 3280 - DNA, 45 bp, Homo sapiens
tctgacccccattcctgcctctcaccccctcccagaccccaccct

SEQ ID NO: 3281 - DNA, 22 bp, Homo sapiens
tcaccccctcccagaccccacc

SEQ ID NO: 3282 - DNA, 22 bp, Homo sapiens
ccccattcctgcctctcacccc

SEQ ID NO: 3283 - DNA, 31 bp, Homo sapiens
cccatttctggctcccctttggctgcactca

SEQ ID NO: 3284 - DNA, 22 bp, Homo sapiens
tttctggctcccctttggctgc

SEQ ID NO: 3285 - DNA, 31 bp, Homo sapiens
ggtaaaagaccctcccccctatgctggccca

SEQ ID NO: 3286 - DNA, 22 bp, Homo sapiens
agaccctcccccctatgctggc

SEQ ID NO: 3287 - DNA, 54 bp, Homo sapiens
ctgatttgccatgccccagccttgaaagccacccataagccccagctagtctcc

SEQ ID NO: 3288 - DNA, 22 bp, Homo sapiens
aaagccacccataagccccagc

SEQ ID NO: 3289 - DNA, 39 bp, Homo sapiens
cccacacacacataccccagagccaccgaggaagggaaa

SEQ ID NO: 3290 - DNA, 22 bp, Homo sapiens
accccagagccaccgaggaagg

SEQ ID NO: 3291 - DNA, 23 bp, Homo sapiens
ccctcgctgtctggctgctccgc

SEQ ID NO: 3292 - DNA, 59 bp, Homo sapiens
ttctcccgaccagctcgtccctcctcccgctcctcctccccctcctccccgcagtggcg

SEQ ID NO: 3293 - DNA, 22 bp, Homo sapiens
tccccctcctccccgcagtggc

SEQ ID NO: 3294 - DNA, 23 bp, Homo sapiens
gctcctcctccccctcctccccg

SEQ ID NO: 3295 - DNA, 22 bp, Homo sapiens
tcgtccctcctcccgctcctcc

SEQ ID NO: 3296 - DNA, 28 bp, Homo sapiens
gggtccccaagtcctgcctcctcgcggg

SEQ ID NO: 3297 - DNA, 22 bp, Homo sapiens
cccaagtcctgcctcctcgcgg

SEQ ID NO: 3298 - DNA, 26 bp, Homo sapiens
ccggcggcaaagggaggcggtctggg

SEQ ID NO: 3299 - DNA, 22 bp, Homo sapiens
cggcggcaaagggaggcggtct

SEQ ID NO: 3300 - DNA, 48 bp, Homo sapiens
gcgtcagcaccagtagccacagcagcggtagcagcagcggcagcagcc

SEQ ID NO: 3301 - DNA, 23 bp, Homo sapiens
cggtagcagcagcggcagcagcc

SEQ ID NO: 3302 - DNA, 22 bp, Homo sapiens
cagcagcggtagcagcagcggc

SEQ ID NO: 3303 - DNA, 22 bp, Homo sapiens
gcaccagtagccacagcagcgg

SEQ ID NO: 3304 - DNA, 23 bp, Homo sapiens
ggcggcacctccccctggctcgg

SEQ ID NO: 3305 - DNA, 22 bp, Homo sapiens
gcggcacctccccctggctcgg

SEQ ID NO: 3306 - DNA, 34 bp, Homo sapiens
gccctcaatttcccctccacggctcaaccactgc

SEQ ID NO: 3307 - DNA, 23 bp, Homo sapiens
cccctccacggctcaaccactgc

SEQ ID NO: 3308 - DNA, 22 bp, Homo sapiens
gccctcaatttcccctccacgg

SEQ ID NO: 3309 - DNA, 39 bp, Homo sapiens
gagctgaagcaatagttggtgtccagggctcggcggtgc

SEQ ID NO: 3310 - DNA, 22 bp, Homo sapiens
ggtgtccagggctcggcggtgc

SEQ ID NO: 3311 - DNA, 25 bp, Homo sapiens
tgccgcacgcagcagttcttctccg

SEQ ID NO: 3312 - DNA, 22 bp, Homo sapiens
cgcacgcagcagttcttctccg

SEQ ID NO: 3313 - DNA, 39 bp, Homo sapiens
gtagtgttccccactggtcccctgtgccttgatgccggg

SEQ ID NO: 3314 - DNA, 22 bp, Homo sapiens
tcccctgtgccttgatgccggg

SEQ ID NO: 3315 - DNA, 23 bp, Homo sapiens
gggcttggtggcaggcttgaggc

SEQ ID NO: 3316 - DNA, 25 bp, Homo sapiens
gaggcctgtgtttgggtcctgcggg

SEQ ID NO: 3317 - DNA, 23 bp, Homo sapiens
ggcctgtgtttgggtcctgcggg

SEQ ID NO: 3318 - DNA, 40 bp, Homo sapiens
acccctcacactccccatcctccctgctccgattccgagg

SEQ ID NO: 3319 - DNA, 22 bp, Homo sapiens
ctccccatcctccctgctccga

SEQ ID NO: 3320 - DNA, 22 bp, Homo sapiens
cctccctgctccgattccgagg

SEQ ID NO: 3321 - DNA, 32 bp, Homo sapiens
gctgaggaacaagcaccgcctggagccctggg

SEQ ID NO: 3322 - DNA, 22 bp, Homo sapiens
aagcaccgcctggagccctggg

SEQ ID NO: 3323 - DNA, 24 bp, Homo sapiens
ggctgaggaacaagcaccgcctgg

SEQ ID NO: 3324 - DNA, 31 bp, Homo sapiens
gtactaaccctacccccaaacccaaacccag

SEQ ID NO: 3325 - DNA, 22 bp, Homo sapiens
ccctacccccaaacccaaaccc

SEQ ID NO: 3326 - DNA, 41 bp, Homo sapiens
ttggtctggtaggagacggcgatgcggctgatggtgtgggt

SEQ ID NO: 3327 - DNA, 22 bp, Homo sapiens
cggcgatgcggctgatggtgtg

SEQ ID NO: 3328 - DNA, 22 bp, Homo sapiens
tggtaggagacggcgatgcggc

SEQ ID NO: 3329 - DNA, 22 bp, Homo sapiens
gggaggcgtttgggaaggttgg

SEQ ID NO: 3330 - DNA, 22 bp, Homo sapiens
ggagtgaaatcacccggaattc

SEQ ID NO: 3331 - DNA, 51 bp, Homo sapiens
tgtgtaggaccctggaggctgaaccccgtccccatgcccctcaaaacctat

SEQ ID NO: 3332 - DNA, 22 bp, Homo sapiens
ccccgtccccatgcccctcaaa

SEQ ID NO: 3333 - DNA, 24 bp, Homo sapiens
ccctggaggctgaaccccgtcccc

SEQ ID NO: 3334 - DNA, 38 bp, Homo sapiens
gctcatctggaggaagcggtagtgggccctgcaccttc

SEQ ID NO: 3335 - DNA, 22 bp, Homo sapiens
ggaagcggtagtgggccctgca

SEQ ID NO: 3336 - DNA, 30 bp, Homo sapiens
cctcctcggccagctccacgtcccggatca

SEQ ID NO: 3337 - DNA, 23 bp, Homo sapiens
ggccagctccacgtcccggatca

SEQ ID NO: 3338 - DNA, 24 bp, Homo sapiens
cctcctcggccagctccacgtccc

SEQ ID NO: 3339 - DNA, 36 bp, Homo sapiens
gccctcgagctctgcccaccccacatccggttcctg

SEQ ID NO: 3340 - DNA, 22 bp, Homo sapiens
tgcccaccccacatccggttcc

SEQ ID NO: 3341 - DNA, 22 bp, Homo sapiens
gccctcgagctctgcccacccc

SEQ ID NO: 3342 - DNA, 22 bp, Homo sapiens
ggcattggcccggcggttcagc

SEQ ID NO: 3343 - DNA, 22 bp, Homo sapiens
gggaatcgtgggctgggagggc

SEQ ID NO: 3344 - DNA, 52 bp, Homo sapiens
tttatagaggaagcggcagtggcagcgtggcaggcagcgggcgggttctagg

SEQ ID NO: 3345 - DNA, 21 bp, Homo sapiens
cagcgtggcaggcagcgggcg

SEQ ID NO: 3346 - DNA, 22 bp, Homo sapiens
cggcagtggcagcgtggcaggc

SEQ ID NO: 3347 - DNA, 23 bp, Homo sapiens
gaggaagcggcagtggcagcgtg

SEQ ID NO: 3348 - DNA, 45 bp, Homo sapiens
gggcggtagtccaaagcacgaagcacgggcagcccaaggagatgg

SEQ ID NO: 3349 - DNA, 23 bp, Homo sapiens
gcacgggcagcccaaggagatgg

SEQ ID NO: 3350 - DNA, 22 bp, Homo sapiens
gcacgaagcacgggcagcccaa

SEQ ID NO: 3351 - DNA, 35 bp, Homo sapiens
ggagacagcaccccccgacccccgagagagagatc

SEQ ID NO: 3352 - DNA, 25 bp, Homo sapiens
ccccccgacccccgagagagagatc

SEQ ID NO: 3353 - DNA, 22 bp, Homo sapiens
cagcaccccccgacccccgaga

SEQ ID NO: 3354 - DNA, 38 bp, Homo sapiens
ctgagccaccccagcagcccccattctcctgctgcctc

SEQ ID NO: 3355 - DNA, 22 bp, Homo sapiens
gcccccattctcctgctgcctc

SEQ ID NO: 3356 - DNA, 22 bp, Homo sapiens
tgagccaccccagcagccccca

SEQ ID NO: 3357 - DNA, 23 bp, Homo sapiens
ccccagcagcccccattctcctg

SEQ ID NO: 3358 - DNA, 38 bp, Homo sapiens
ggtgtgagctggaggcccggttccctgaagagcaatca

SEQ ID NO: 3359 - DNA, 25 bp, Homo sapiens
ggcccggttccctgaagagcaatca

SEQ ID NO: 3360 - DNA, 22 bp, Homo sapiens
gctggaggcccggttccctgaa

SEQ ID NO: 3361 - DNA, 46 bp, Homo sapiens
ggagagcctcacctgctgtgcggagcccctgggcccggacgctcag

SEQ ID NO: 3362 - DNA, 22 bp, Homo sapiens
gcccctgggcccggacgctcag

SEQ ID NO: 3363 - DNA, 22 bp, Homo sapiens
tgctgtgcggagcccctgggcc

SEQ ID NO: 3364 - DNA, 32 bp, Homo sapiens
ccaggcagagggcaggacactgctgggcggta

SEQ ID NO: 3365 - DNA, 22 bp, Homo sapiens
agggcaggacactgctgggcgg

SEQ ID NO: 3366 - DNA, 22 bp, Homo sapiens
ccaggcagagggcaggacactg

SEQ ID NO: 3367 - DNA, 36 bp, Homo sapiens
gggatccaggcagcaggtgcaggagggaccgaggcc

SEQ ID NO: 3368 - DNA, 22 bp, Homo sapiens
aggtgcaggagggaccgaggcc

SEQ ID NO: 3369 - DNA, 22 bp, Homo sapiens
ccaggcagcaggtgcaggaggg

SEQ ID NO: 3370 - DNA, 38 bp, Homo sapiens
ggaaaccaaaaccaaacccaccaaggcccaggcccagg

SEQ ID NO: 3371 - DNA, 22 bp, Homo sapiens
cccaccaaggcccaggcccagg

SEQ ID NO: 3372 - DNA, 23 bp, Homo sapiens
ccaaacccaccaaggcccaggcc

SEQ ID NO: 3373 - DNA, 27 bp, Homo sapiens
gggcacgcggcggaagacagacctccc

SEQ ID NO: 3374 - DNA, 23 bp, Homo sapiens
gggcacgcggcggaagacagacc

SEQ ID NO: 3375 - DNA, 44 bp, Homo sapiens
tgatgaggacaagggcagagaggcaggcgaaggcagggacatcg

SEQ ID NO: 3376 - DNA, 22 bp, Homo sapiens
gggcagagaggcaggcgaaggc

SEQ ID NO: 3377 - DNA, 34 bp, Homo sapiens
ggcccatcccttcctcccagccccgctcccacct

SEQ ID NO: 3378 - DNA, 22 bp, Homo sapiens
tcctcccagccccgctcccacc

SEQ ID NO: 3379 - DNA, 23 bp, Homo sapiens
ccatcccttcctcccagccccgc

SEQ ID NO: 3380 - DNA, 36 bp, Homo sapiens
tcccgaagttcttctgtgcactcccccaagtttccg

SEQ ID NO: 3381 - DNA, 22 bp, Homo sapiens
tgtgcactcccccaagtttccg

SEQ ID NO: 3382 - DNA, 59 bp, Homo sapiens
ggactggcgccccgagtctcagcctggtccctggtcccgcgtgcgctcccgaagttctt

SEQ ID NO: 3383 - DNA, 22 bp, Homo sapiens
cctggtcccgcgtgcgctcccg

SEQ ID NO: 3384 - DNA, 22 bp, Homo sapiens
cagcctggtccctggtcccgcg

SEQ ID NO: 3385 - DNA, 23 bp, Homo sapiens
ggactggcgccccgagtctcagc

SEQ ID NO: 3386 - DNA, 24 bp, Homo sapiens
gccgcgtcccgctgcccctgcccg

SEQ ID NO: 3387 - DNA, 34 bp, Homo sapiens
gggcggctggaagctgggcgtggagggcgacggg

SEQ ID NO: 3388 - DNA, 22 bp, Homo sapiens
gctgggcgtggagggcgacggg

SEQ ID NO: 3389 - DNA, 22 bp, Homo sapiens
ggcggctggaagctgggcgtgg

SEQ ID NO: 3390 - DNA, 24 bp, Homo sapiens
ccgctccgggccttggttgaggtc

SEQ ID NO: 3391 - DNA, 22 bp, Homo sapiens
ccgctccgggccttggttgagg

SEQ ID NO: 3392 - DNA, 56 bp, Homo sapiens
cggttctgcagctcctccacccgccgcggctcctgcagcccatgccggtcggtgat

SEQ ID NO: 3393 - DNA, 23 bp, Homo sapiens
cctgcagcccatgccggtcggtg

SEQ ID NO: 3394 - DNA, 22 bp, Homo sapiens
ctcctccacccgccgcggctcc

SEQ ID NO: 3395 - DNA, 22 bp, Homo sapiens
tctgcagctcctccacccgccg

SEQ ID NO: 3396 - DNA, 27 bp, Homo sapiens
gctcgcccgccacagctgccacgtgct

SEQ ID NO: 3397 - DNA, 22 bp, Homo sapiens
tcgcccgccacagctgccacgt

SEQ ID NO: 3398 - DNA, 34 bp, Homo sapiens
ttgaggtagaagatgcgctgcaggccctgggtgc

SEQ ID NO: 3399 - DNA, 23 bp, Homo sapiens
gatgcgctgcaggccctgggtgc

SEQ ID NO: 3400 - DNA, 37 bp, Homo sapiens
gggcagcgggcgagagacgagacgccgaggtgggagc

SEQ ID NO: 3401 - DNA, 24 bp, Homo sapiens
gagacgagacgccgaggtgggagc

SEQ ID NO: 3402 - DNA, 18 bp, Homo sapiens
ggcagcgggcgagagacg

SEQ ID NO: 3403 - DNA, 22 bp, Homo sapiens
gggcagcgggcgagagacgaga

SEQ ID NO: 3404 - DNA, 23 bp, Homo sapiens
cggtgtcggcggatggcgggagc

SEQ ID NO: 3405 - DNA, 34 bp, Homo sapiens
ccaaagcggcctcgaagcgggtcccgtgtctgcg

SEQ ID NO: 3406 - DNA, 22 bp, Homo sapiens
cgaagcgggtcccgtgtctgcg

SEQ ID NO: 3407 - DNA, 22 bp, Homo sapiens
aagcggcctcgaagcgggtccc

SEQ ID NO: 3408 - DNA, 23 bp, Homo sapiens
gggatccggaggcgtccactgcg

SEQ ID NO: 3409 - DNA, 22 bp, Homo sapiens
gggatccggaggcgtccactgc

SEQ ID NO: 3410 - DNA, 40 bp, Homo sapiens
caactgacagccccatagtgacggccggaggctttgtcgc

SEQ ID NO: 3411 - DNA, 22 bp, Homo sapiens
tgacggccggaggctttgtcgc

SEQ ID NO: 3412 - DNA, 54 bp, Homo sapiens
gcacactgggccaggccgagggtgaagagctcattccagcaggcccgcacaagg

SEQ ID NO: 3413 - DNA, 23 bp, Homo sapiens
gctcattccagcaggcccgcaca

SEQ ID NO: 3414 - DNA, 23 bp, Homo sapiens
gggccaggccgagggtgaagagc

SEQ ID NO: 3415 - DNA, 22 bp, Homo sapiens
gcacactgggccaggccgaggg

SEQ ID NO: 3416 - DNA, 38 bp, Homo sapiens
ctgagtgccggcaggcgaacgaggatccgggccaatcg

SEQ ID NO: 3417 - DNA, 22 bp, Homo sapiens
ggcgaacgaggatccgggccaa

SEQ ID NO: 3418 - DNA, 23 bp, Homo sapiens
gccggcaggcgaacgaggatccg

SEQ ID NO: 3419 - DNA, 40 bp, Homo sapiens
ctttagcagctcgttgtatttcctggtcaacctctcagcg

SEQ ID NO: 3420 - DNA, 22 bp, Homo sapiens
ggtttgccagccgggacaccca

SEQ ID NO: 3421 - DNA, 22 bp, Homo sapiens
tgcgtgaggtttgccagccggg

SEQ ID NO: 3422 - DNA, 38 bp, Homo sapiens
tacttattttccatcccccctgcctgccccccatagca

SEQ ID NO: 3423 - DNA, 25 bp, Homo sapiens
ttccatcccccctgcctgcccccca

SEQ ID NO: 3424 - DNA, 39 bp, Homo sapiens; identical to SEQ ID NO: 3193

SEQ ID NO: 3425 - DNA, 22 bp, Homo sapiens
tcccgccgcagcttagcctggg

SEQ ID NO: 3426 - DNA, 22 bp, Homo sapiens
ttcgtcgagctcccgccgcagc

SEQ ID NO: 3427 - DNA, 47 bp, Homo sapiens
gctttgttcttgggctctggctccgggcggagtcgttcccaccaggc

SEQ ID NO: 3428 - DNA, 22 bp, Homo sapiens
ggcggagtcgttcccaccaggc

SEQ ID NO: 3429 - DNA, 22 bp, Homo sapiens
ttgggctctggctccgggcgga

SEQ ID NO: 3430 - DNA, 23 bp, Homo sapiens
gggagaggctgggcggagttggg

SEQ ID NO: 3431 - DNA, 27 bp, Homo sapiens
gggaatggatccgttgacctgcaggtc

SEQ ID NO: 3432 - DNA, 22 bp, Homo sapiens
gggaatggatccgttgacctgc

SEQ ID NO: 3433 - DNA, 22 bp, Homo sapiens
gggcaatgggtggacagggcgg

SEQ ID NO: 3434 - DNA, 21 bp, Homo sapiens
gggcaatgggtggacagggcg

SEQ ID NO: 3435 - DNA, 37 bp, Homo sapiens
agggagaatctcctgtcgcagccacccctccccctgg

SEQ ID NO: 3436 - DNA, 22 bp, Homo sapiens
tcgcagccacccctccccctgg

SEQ ID NO: 3437 - DNA, 32 bp, Homo sapiens
gctgccatcccctgcccgcccatccgtcctgg

SEQ ID NO: 3438 - DNA, 22 bp, Homo sapiens
tcccctgcccgcccatccgtcc

SEQ ID NO: 3439 - DNA, 42 bp, Homo sapiens
ctccggcacctcccctccctggcttcctgggctccgtcgaaa

SEQ ID NO: 3440 - DNA, 22 bp, Homo sapiens
cctggcttcctgggctccgtcg

SEQ ID NO: 3441 - DNA, 22 bp, Homo sapiens
tccggcacctcccctccctggc

SEQ ID NO: 3442 - DNA, 37 bp, Homo sapiens
gttgcgtgaagctcgtgctcatcaggcggcggttgcg

SEQ ID NO: 3443 - DNA, 22 bp, Homo sapiens
tgctcatcaggcggcggttgcg

SEQ ID NO: 3444 - DNA, 35 bp, Homo sapiens
ggatgagagcccagccctcccagccccatgtccag

SEQ ID NO: 3445 - DNA, 22 bp, Homo sapiens
gcccagccctcccagccccatg

SEQ ID NO: 3446 - DNA, 23 bp, Homo sapiens
gccctccacactgcccatcccct

SEQ ID NO: 3447 - DNA, 38 bp, Homo sapiens
  misc_feature 10, 11: n= a, c, g, or t
cagcctgctnngtcccgcccactccgccctgcagcagc

SEQ ID NO: 3448 - DNA, 22 bp, Homo sapiens
ccgcccactccgccctgcagca

SEQ ID NO: 3449 - DNA, 33 bp, Homo sapiens
ctgcccactctcccaggtcagcagcagccccac

SEQ ID NO: 3450 - DNA, 22 bp, Homo sapiens
tcccaggtcagcagcagcccca

SEQ ID NO: 3451 - DNA, 43 bp, Homo sapiens
gtttacgtaatgctccagccccccgccgtgcccacttcgcaga

SEQ ID NO: 3452 - DNA, 23 bp, Homo sapiens
gccccccgccgtgcccacttcgc

SEQ ID NO: 3453 - DNA, 22 bp, Homo sapiens
tgctccagccccccgccgtgcc

SEQ ID NO: 3454 - DNA, 41 bp, Homo sapiens
cctccagtgggatggtcaaggcagggaggcggtagcggctc

SEQ ID NO: 3455 - DNA, 22 bp, Homo sapiens
ggcagggaggcggtagcggctc

SEQ ID NO: 3456 - DNA, 23 bp, Homo sapiens
gggatggtcaaggcagggaggcg

SEQ ID NO: 3457 - DNA, 37 bp, Homo sapiens
ggcaccgcgcagtgaccccctccctcccctccagtgg

SEQ ID NO: 3458 - DNA, 22 bp, Homo sapiens
ccccctccctcccctccagtgg

SEQ ID NO: 3459 - DNA, 22 bp, Homo sapiens
ggcaccgcgcagtgaccccctc

SEQ ID NO: 3460 - DNA, 30 bp, Homo sapiens
gcccctgccgccaccccacccagagcctgc

SEQ ID NO: 3461 - DNA, 22 bp, Homo sapiens
tgccgccaccccacccagagcc

SEQ ID NO: 3462 - DNA, 22 bp, Homo sapiens
gcccctgccgccaccccaccca

SEQ ID NO: 3463 - DNA, 28 bp, Homo sapiens
aagcttcccctcattcgcccacctggaa

SEQ ID NO: 3464 - DNA, 22 bp, Homo sapiens
tcccctcattcgcccacctgga

SEQ ID NO: 3465 - DNA, 29 bp, Homo sapiens
aggagagaccctgaggtgcggcgctggcg

SEQ ID NO: 3466 - DNA, 22 bp, Homo sapiens
accctgaggtgcggcgctggcg

SEQ ID NO: 3467 - DNA, 28 bp, Homo sapiens
gcggttgcgcggcccctggctcagctgc

SEQ ID NO: 3468 - DNA, 22 bp, Homo sapiens
ttgcgcggcccctggctcagct

SEQ ID NO: 3469 - DNA, 47 bp, Homo sapiens
gaaacccctccccctgcactccacccccaccatgcccctcccaagaa

SEQ ID NO: 3470 - DNA, 22 bp, Homo sapiens
ccacccccaccatgcccctccc

SEQ ID NO: 3471 - DNA, 22 bp, Homo sapiens
ccccctgcactccacccccacc

SEQ ID NO: 3472 - DNA, 26 bp, Homo sapiens
gtgtccccttttcacctggcggccaa

SEQ ID NO: 3473 - DNA, 23 bp, Homo sapiens
tccccttttcacctggcggccaa

SEQ ID NO: 3474 - DNA, 26 bp, Homo sapiens
ggaccagcccccagcaccccatctgt

SEQ ID NO: 3475 - DNA, 22 bp, Homo sapiens
ggaccagcccccagcaccccat

SEQ ID NO: 3476 - DNA, 33 bp, Homo sapiens
catcaagctgcggacgatgcgggacttgggaaa

SEQ ID NO: 3477 - DNA, 22 bp, Homo sapiens
tgcggacgatgcgggacttggg

SEQ ID NO: 3478 - DNA, 33 bp, Homo sapiens
tcgtatgaattctgttggcgggtgctggaaggc

SEQ ID NO: 3479 - DNA, 22 bp, Homo sapiens
ctgttggcgggtgctggaaggc

SEQ ID NO: 3480 - DNA, 25 bp, Homo sapiens
ccacggctcctggctcccaccccct

SEQ ID NO: 3481 - DNA, 23 bp, Homo sapiens
cacggctcctggctcccaccccc

SEQ ID NO: 3482 - DNA, 39 bp, Homo sapiens
gtctatgatgctggacgcgcggctgaagtggtcctgcat

SEQ ID NO: 3483 - DNA, 22 bp, Homo sapiens
gctggacgcgcggctgaagtgg

SEQ ID NO: 3484 - DNA, 53 bp, Homo sapiens
cagctgtactccccgatgtggtaccccctgccccatctcccactgccgtgctg

SEQ ID NO: 3485 - DNA, 22 bp, Homo sapiens
gccccatctcccactgccgtgc

SEQ ID NO: 3486 - DNA, 25 bp, Homo sapiens
tccccgatgtggtaccccctgcccc

SEQ ID NO: 3487 - DNA, 24 bp, Homo sapiens
gcccaaagcccctgaatccccata

SEQ ID NO: 3488 - DNA, 22 bp, Homo sapiens
gcccaaagcccctgaatcccca

SEQ ID NO: 3489 - DNA, 44 bp, Homo sapiens
tggatcaccctgtacatcacctggcccccattctcagttcggaa

SEQ ID NO: 3490 - DNA, 23 bp, Homo sapiens
cctggcccccattctcagttcgg

SEQ ID NO: 3491 - DNA, 23 bp, Homo sapiens
ccctgtacatcacctggccccca

SEQ ID NO: 3492 - DNA, 23 bp, Homo sapiens
gccatccagctgcccctcagaca

SEQ ID NO: 3493 - DNA, 27 bp, Homo sapiens
gtgaaagcaccctggatcaccgcctgg

SEQ ID NO: 3494 - DNA, 22 bp, Homo sapiens
agcaccctggatcaccgcctgg

SEQ ID NO: 3495 - DNA, 35 bp, Homo sapiens
gcagctgtactccccgatgtggtaccccctgcccc

SEQ ID NO: 3496 - DNA, 22 bp, Homo sapiens
cccgatgtggtaccccctgccc

SEQ ID NO: 3497 - DNA, 36 bp, Homo sapiens
ggtcgcctgccccagcagtgcctctgagccctgggt

SEQ ID NO: 3498 - DNA, 23 bp, Homo sapiens
gccccagcagtgcctctgagccc

SEQ ID NO: 3499 - DNA, 23 bp, Homo sapiens
ggtcgcctgccccagcagtgcct

SEQ ID NO: 3500 - DNA, 33 bp, Homo sapiens
gggcaattgagcgctggcttcctccctgcagta

SEQ ID NO: 3501 - DNA, 22 bp, Homo sapiens
tgagcgctggcttcctccctgc

SEQ ID NO: 3502 - DNA, 47 bp, Homo sapiens
tccagttgttgatcttgtctcggcggcgacgctccacttcattatgc

SEQ ID NO: 3503 - DNA, 24 bp, Homo sapiens
tctcggcggcgacgctccacttca

SEQ ID NO: 3504 - DNA, 46 bp, Homo sapiens
gatgacgacctctaatccgtggtgccgcaactgagctcgaagcagc

SEQ ID NO: 3505 - DNA, 22 bp, Homo sapiens
cgtggtgccgcaactgagctcg

SEQ ID NO: 3506 - DNA, 41 bp, Homo sapiens
attgtgtgcttcacaccactgcaggccgccatatcacaggg

SEQ ID NO: 3507 - DNA, 22 bp, Homo sapiens
ttcacaccactgcaggccgcca

SEQ ID NO: 3508 - DNA, 24 bp, Homo sapiens
gcgagaggagcacaaggcccaggg

SEQ ID NO: 3509 - DNA, 46 bp, Homo sapiens
cagtcactccgtggccccaggcaccccccacccccataagccaact

SEQ ID NO: 3510 - DNA, 22 bp, Homo sapiens
ccgtggccccaggcacccccca

SEQ ID NO: 3511 - DNA, 22 bp, Homo sapiens
gcaccccccacccccataagcc

SEQ ID NO: 3512 - DNA, 31 bp, Homo sapiens
ggctcccacccaccccaaccctccctttcca

SEQ ID NO: 3513 - DNA, 22 bp, Homo sapiens
tcccacccaccccaaccctccc

SEQ ID NO: 3514 - DNA, 41 bp, Homo sapiens
ctcacagcttctcccctatccttcccccagtcccctccctt

SEQ ID NO: 3515 - DNA, 22 bp, Homo sapiens
tccttcccccagtcccctccct

SEQ ID NO: 3516 - DNA, 35 bp, Homo sapiens
ggcccttgttcctgctgcccccccaaccccagatg

SEQ ID NO: 3517 - DNA, 22 bp, Homo sapiens
tcctgctgcccccccaacccca

SEQ ID NO: 3518 - DNA, 54 bp, Homo sapiens
ttggaatcctggagtgacccctggccttctccccgctccaacaccctcaacccc

SEQ ID NO: 3519 - DNA, 22 bp, Homo sapiens
ccgctccaacaccctcaacccc

SEQ ID NO: 3520 - DNA, 22 bp, Homo sapiens
cccctggccttctccccgctcc

SEQ ID NO: 3521 - DNA, 28 bp, Homo sapiens
gggcattggcgaggagggagcaggaaag

SEQ ID NO: 3522 - DNA, 22 bp, Homo sapiens
gggcattggcgaggagggagca

SEQ ID NO: 3523 - DNA, 24 bp, Homo sapiens
gcccgcagcccgccgcaatgaagg

SEQ ID NO: 3524 - DNA, 22 bp, Homo sapiens
gcccgcagcccgccgcaatgaa

SEQ ID NO: 3525 - DNA, 38 bp, Homo sapiens
aggtcactcactttgcccctgtcgctttcgctgctcgc

SEQ ID NO: 3526 - DNA, 22 bp, Homo sapiens
ttgcccctgtcgctttcgctgc

SEQ ID NO: 3527 - DNA, 38 bp, Homo sapiens
cgacgccgcgagccccgaccccctccaccccgcctccg

SEQ ID NO: 3528 - DNA, 23 bp, Homo sapiens
gacgccgcgagccccgaccccct

SEQ ID NO: 3529 - DNA, 28 bp, Homo sapiens
cgcacaccgccgcctcacccgtccatga

SEQ ID NO: 3530 - DNA, 22 bp, Homo sapiens
cgcacaccgccgcctcacccgt

SEQ ID NO: 3531 - DNA, 21 bp, Homo sapiens
gggagtgagggcacagaattc

SEQ ID NO: 3532 - DNA, 31 bp, Homo sapiens
gctcattctggccccctcccttgcatccctt

SEQ ID NO: 3533 - DNA, 22 bp, Homo sapiens
tggccccctcccttgcatccct

SEQ ID NO: 3534 - DNA, 42 bp, Homo sapiens
cacatcttccctaagtgctcccaaaggcccccatcccattct

SEQ ID NO: 3535 - DNA, 22 bp, Homo sapiens
gctcccaaaggcccccatccca

SEQ ID NO: 3536 - DNA, 28 bp, Homo sapiens
gaaactctgtccagagacacgcgcccgc

SEQ ID NO: 3537 - DNA, 22 bp, Homo sapiens
ctgtccagagacacgcgcccgc

SEQ ID NO: 3538 - DNA, 41 bp, Homo sapiens
aatatcaaattccagcaccgagcgccctggccggtgagtcc

SEQ ID NO: 3539 - DNA, 23 bp, Homo sapiens
cgagcgccctggccggtgagtcc

SEQ ID NO: 3540 - DNA, 44 bp, Homo sapiens
ggaagtagagcaatctccccaagccgtcggcccgattcaagtgg

SEQ ID NO: 3541 - DNA, 22 bp, Homo sapiens
tctccccaagccgtcggcccga

SEQ ID NO: 3542 - DNA, 27 bp, Homo sapiens
gcccgcgcgctctctctgaccccgtct

SEQ ID NO: 3543 - DNA, 22 bp, Homo sapiens
cccgcgcgctctctctgacccc

SEQ ID NO: 3544 - DNA, 27 bp, Homo sapiens
gctccggcggtcacccccaaaagcagg

SEQ ID NO: 3545 - DNA, 22 bp, Homo sapiens
ccggcggtcacccccaaaagca

SEQ ID NO: 3546 - DNA, 41 bp, Homo sapiens
ctcttccttctcttcttcctcctccccctcctccggctgcg

SEQ ID NO: 3547 - DNA, 22 bp, Homo sapiens
tcctccccctcctccggctgcg

SEQ ID NO: 3548 - DNA, 25 bp, Homo sapiens
gcgcgcgcggctggagcactgtctg

SEQ ID NO: 3549 - DNA, 22 bp, Homo sapiens
gcgcgcggctggagcactgtct

SEQ ID NO: 3550 - DNA, 34 bp, Homo sapiens
cggctcgcgctccctctccggctcgggctgtggg

SEQ ID NO: 3551 - DNA, 22 bp, Homo sapiens
cctctccggctcgggctgtggg

SEQ ID NO: 3552 - DNA, 22 bp, Homo sapiens
tcgcgctccctctccggctcgg

SEQ ID NO: 3553 - DNA, 25 bp, Homo sapiens
gcagcagcccccgcatcgcatcagg

SEQ ID NO: 3554 - DNA, 22 bp, Homo sapiens
gcagcccccgcatcgcatcagg

SEQ ID NO: 3555 - DNA, 41 bp, Homo sapiens
gggcacacactccaggccctcgtcattgcagcagcccccgc

SEQ ID NO: 3556 - DNA, 22 bp, Homo sapiens
tcgtcattgcagcagcccccgc

SEQ ID NO: 3557 - DNA, 61 bp, Homo sapiens
caggacttataccgggatttcttgcgctttcgtttttgcccctttccctttcctcgaactg

SEQ ID NO: 3558 - DNA, 22 bp, Homo sapiens
tttgcccctttccctttcctcg

SEQ ID NO: 3559 - DNA, 22 bp, Homo sapiens
accgggatttcttgcgctttcg

SEQ ID NO: 3560 - DNA, 27 bp, Homo sapiens
agcgggcaccaacgtacacgctccagg

SEQ ID NO: 3561 - DNA, 22 bp, Homo sapiens
cgggcaccaacgtacacgctcc

SEQ ID NO: 3562 - DNA, 60 bp, Homo sapiens
tcttgtacaaacaaatgctttctccgctctgagcaaggcccacagggactgcaaaaaggc

SEQ ID NO: 3563 - DNA, 23 bp, Homo sapiens
ccgctctgagcaaggcccacagg

SEQ ID NO: 3564 - DNA, 24 bp, Homo sapiens
gccgcctgcctcctcccaactcat

SEQ ID NO: 3565 - DNA, 22 bp, Homo sapiens
gccgcctgcctcctcccaactc

SEQ ID NO: 3566 - DNA, 36 bp, Homo sapiens
agaaatctgtcatgctggtctgccgccgttttcgac

SEQ ID NO: 3567 - DNA, 22 bp, Homo sapiens
tgctggtctgccgccgttttcg

SEQ ID NO: 3568 - DNA, 41 bp, Homo sapiens
ggtctgctccagtaccccaccttccccctgccttcacaaga

SEQ ID NO: 3569 - DNA, 22 bp, Homo sapiens
ccccaccttccccctgccttca

SEQ ID NO: 3570 - DNA, 26 bp, Homo sapiens
agctgctcgctgtccactgggccgaa

SEQ ID NO: 3571 - DNA, 22 bp, Homo sapiens
tgctcgctgtccactgggccga

SEQ ID NO: 3572 - DNA, 45 bp, Homo sapiens
aagttccatcgctcacgggcctcctggatgcagcccgccattagc

SEQ ID NO: 3573 - DNA, 22 bp, Homo sapiens
gcctcctggatgcagcccgcca

SEQ ID NO: 3574 - DNA, 22 bp, Homo sapiens
ccatcgctcacgggcctcctgg

SEQ ID NO: 3575 - DNA, 31 bp, Homo sapiens
gcaggccaaggccccgcacacgctcccaggc

SEQ ID NO: 3576 - DNA, 22 bp, Homo sapiens
ggccccgcacacgctcccaggc

SEQ ID NO: 3577 - DNA, 22 bp, Homo sapiens
gcaggccaaggccccgcacacg

SEQ ID NO: 3578 - DNA, 33 bp, Homo sapiens
gggagcggacaggcggtcgggttgcggagagcc

SEQ ID NO: 3579 - DNA, 22 bp, Homo sapiens
gcggacaggcggtcgggttgcg

SEQ ID NO: 3580 - DNA, 46 bp, Homo sapiens
gggtgggtgggtgaatgagtaggtgggagggagggcgggaagtggg

SEQ ID NO: 3581 - DNA, 22 bp, Homo sapiens
gggagggagggcgggaagtggg

SEQ ID NO: 3582 - DNA, 32 bp, Homo sapiens
ccggctctgggtgggtgggtgggtgaatgagt

SEQ ID NO: 3583 - DNA, 22 bp, Homo sapiens
ccggctctgggtgggtgggtgg

SEQ ID NO: 3584 - DNA, 28 bp, Homo sapiens
gcacagccgccgccgccacccagggagg

SEQ ID NO: 3585 - DNA, 22 bp, Homo sapiens
cagccgccgccgccacccaggg

SEQ ID NO: 3586 - DNA, 35 bp, Homo sapiens
cctgtttgatgaaggagtgaggcggcggcggcggg

SEQ ID NO: 3587 - DNA, 23 bp, Homo sapiens
gatgaaggagtgaggcggcggcg

SEQ ID NO: 3588 - DNA, 24 bp, Homo sapiens
ccgggtgtgggcgctgccttgaac

SEQ ID NO: 3589 - DNA, 40 bp, Homo sapiens
cgtgtgctgagacgccggctccgggacacacgtggaagcc

SEQ ID NO: 3590 - DNA, 22 bp, Homo sapiens
cgccggctccgggacacacgtg

SEQ ID NO: 3591 - DNA, 22 bp, Homo sapiens
tgctgagacgccggctccggga

SEQ ID NO: 3592 - DNA, 34 bp, Homo sapiens
gcacccaggcccggagcggagcgtgtgctgagac

SEQ ID NO: 3593 - DNA, 22 bp, Homo sapiens
cacccaggcccggagcggagcg

SEQ ID NO: 3594 - DNA, 22 bp, Homo sapiens
gcccggagcggagcgtgtgctg

SEQ ID NO: 3595 - DNA, 22 bp, Homo sapiens
gggcgcaaagtccagcaccggc

SEQ ID NO: 3596 - DNA, 24 bp, Homo sapiens
cctcggctcctcggctgcgggcgg

SEQ ID NO: 3597 - DNA, 22 bp, Homo sapiens
cctcggctcctcggctgcgggc

SEQ ID NO: 3598 - DNA, 43 bp, Homo sapiens
taactcttcttgccgctcttcttgccgccgcccttcttgacgc

SEQ ID NO: 3599 - DNA, 22 bp, Homo sapiens
gccgctcttcttgccgccgccc

SEQ ID NO: 3600 - DNA, 31 bp, Homo sapiens
gcgcgcagcccgtccgagtcgtcgccgccca

SEQ ID NO: 3601 - DNA, 22 bp, Homo sapiens
gcccgtccgagtcgtcgccgcc

SEQ ID NO: 3602 - DNA, 22 bp, Homo sapiens
gggcaccattttctcgggcggc

SEQ ID NO: 3603 - DNA, 22 bp, Homo sapiens
cccagccaaggcgacctcccgg

SEQ ID NO: 3604 - DNA, 27 bp, Homo sapiens
cctcgcgaattgccgggcccctggaga

SEQ ID NO: 3605 - DNA, 24 bp, Homo sapiens
gggactccccctggctggctttag

SEQ ID NO: 3606 - DNA, 35 bp, Homo sapiens
ggcctgcccttccaatggatccactcacagtttcc

SEQ ID NO: 3607 - DNA, 30 bp, Homo sapiens
gcccttccaatggatccactcacagtttcc

SEQ ID NO: 3608 - DNA, 21 bp, Homo sapiens
gccccagctgctcaccatcgc

SEQ ID NO: 3609 - DNA, 21 bp, Homo sapiens
gccccagctgctcaccatcgc

SEQ ID NO: 3610 - DNA, 64 bp, Homo sapiens
ccttaacccctcctcccagagaccccagttgcaaaccagacctcaggcggctcatagggcacca

SEQ ID NO: 3611 - DNA, 30 bp, Homo sapiens
accccagttgcaaaccagacctcaggcggc

SEQ ID NO: 3612 - DNA, 29 bp, Homo sapiens
cgctcacgcccacggatctgcagcaacag

SEQ ID NO: 3613 - DNA, 28 bp, Homo sapiens
cgctcacgcccacggatctgcagcaaca

SEQ ID NO: 3614 - DNA, 50 bp, Homo sapiens
gtctcctccaccgcttcttgtcctgcttgcttacctcgcttagtgctccc

SEQ ID NO: 3615 - DNA, 28 bp, Homo sapiens
cgcttcttgtcctgcttgcttacctcgc

SEQ ID NO: 3616 - DNA, 42 bp, Homo sapiens
gggagaggagctggtgttgttgggcagtgctaggaaagaggc

SEQ ID NO: 3617 - DNA, 34 bp, Homo sapiens
gggagaggagctggtgttgttgggcagtgcagga

SEQ ID NO: 3618 - DNA, 55 bp, Homo sapiens
gctaggatctgactgcggctcctccatggcagtgacccggaaggcagtctggctg

SEQ ID NO: 3619 - DNA, 28 bp, Homo sapiens
catggcagtgacccggaaggcagtctgg

SEQ ID NO: 3620 - DNA, 33 bp, Homo sapiens
gcggctcctccatggcagtgacccggaaggcag

SEQ ID NO: 3621 - DNA, 33 bp, Homo sapiens
cctccatggcagtgacccggaaggcagtctggc

SEQ ID NO: 3622 - DNA, 35 bp, Homo sapiens
cctccatggcagtgacccggaaggcagtctggctg

SEQ ID NO: 3623 - DNA, 26 bp, Homo sapiens
ggatctgactgcggctcctccatggc

SEQ ID NO: 3624 - DNA, 48 bp, Homo sapiens
gaaagcacgctcccagcccgaacgcaaagtgtccccggagcccagcag

SEQ ID NO: 3625 - DNA, 31 bp, Homo sapiens
cgaacgcaaagtgtccccggagcccagcagc

SEQ ID NO: 3626 - DNA, 33 bp, Homo sapiens
gcacgctcccagcccgaacgcaaagtgtccccg

SEQ ID NO: 3627 - DNA, 39 bp, Homo sapiens
gggtagaggaactgtgagctcgtcggcgtggtggtgacc

SEQ ID NO: 3628 - DNA, 35 bp, Homo sapiens
agaggaactgtgagctcgtcggcgtggtggtgacc

SEQ ID NO: 3629 - DNA, 31 bp, Homo sapiens
aggaactgtgagctcgtcggcgtggtggtga

SEQ ID NO: 3630 - RNA, 50 nt, Artificial Sequence
  Synthetic Sequence
caaaacuuuuagcgccagucuugagcacaugggaggggaaaaccccaauc

SEQ ID NO: 3631 - protein, 7 aa, Artificial Sequence
  Synthetic Sequence
KRRQRRR

SEQ ID NO: 3632 - protein, 12 aa, Artificial Sequence
  Synthetic Sequence
GYGRKKRRQRRR

SEQ ID NO: 3633 - protein, 11 aa, Artificial Sequence
  Synthetic Sequence
YGRKKRRQRRR

SEQ ID NO: 3634 - protein, 12 aa, Artificial Sequence
  Synthetic Sequence
CYGRKKRRQRRR

SEQ ID NO: 3635 - protein, 13 aa, Artificial Sequence
  Synthetic Sequence
RKKRRQRRRPPQC

SEQ ID NO: 3636 - protein, 12 aa, Artificial Sequence
  Synthetic Sequence
CYQRKKRRQRRR

SEQ ID NO: 3637 - protein, 9 aa, Artificial Sequence
  Synthetic Sequence
RKKRRQRRR

SEQ ID NO: 3638 - protein, 17 aa, Artificial Sequence
  Synthetic Sequence
  VARIANT 7: Xaa = Phe or Trp
GALFLGXLGAAGSTMGA

SEQ ID NO: 3639 - protein, 27 aa, Artificial Sequence
  Synthetic Sequence
  VARIANT 7: Xaa = Phe or Trp
GALFLGXLGAAGSTMGAWSQPKKKRKV

SEQ ID NO: 3640 - protein, 27 aa, Artificial Sequence
  Synthetic Sequence
  VARIANT 7: Xaa = Phe or Trp
GALFLGXLGAAGSTMGAWSQPKSKRKV

SEQ ID NO: 3641 - protein, 16 aa, Artificial Sequence
  Synthetic Sequence
RQIKIWFQNRRMKWKK

SEQ ID NO: 3642 - protein, 19 aa, Artificial Sequence
  Synthetic Sequence
RQIKIWFQNRRMKWKKGGC

SEQ ID NO: 3643 - protein, 23 aa, Artificial Sequence
  Synthetic Sequence
LIRLWSHLIHIWFQNRRLKWKKK

SEQ ID NO: 3644 - protein, 36 aa, Artificial Sequence
  Synthetic Sequence
GLFGAIAGFIENGWEGMIDGRQIKIWFQNRRMKWKK

SEQ ID NO: 3645 - protein, 16 aa, Artificial Sequence
  Synthetic Sequence
FFGAVIGTIALGVATA

SEQ ID NO: 3646 - protein, 16 aa, Artificial Sequence
  Synthetic Sequence
FLGFLLGVGSAIASGV

SEQ ID NO: 3647 - protein, 16 aa, Artificial Sequence
  Synthetic Sequence
GVFVLGFLGFLATAGS

SEQ ID NO: 3648 - protein, 16 aa, Artificial Sequence
  Synthetic Sequence
GAAIGLAWIPYFGPAA

SEQ ID NO: 3649 - protein, 34 aa, Artificial Sequence
  Synthetic Sequence
  VARIANT 34: Xaa = Asp or Glu
DAATATRGRSAASRPTERPRAPARSASRPRRPVX

SEQ ID NO: 3650 - protein, 18 aa, Artificial Sequence
  Synthetic Sequence
KLAKLLALKALKAALKLA

SEQ ID NO: 3651 - protein, 18 aa, Artificial Sequence
  Synthetic Sequence
KLALKLALKALKAALKLA

SEQ ID NO: 3652 - protein, 21 aa, Artificial Sequence
  Synthetic Sequence
KETWWETWWTEWSQPKKKRKV

SEQ ID NO: 3653 - protein, 21 aa, Artificial Sequence
  Synthetic Sequence
KETWFETWFTEWSQPKKKRKV

SEQ ID NO: 3654 - protein, 21 aa, Artificial Sequence
  Synthetic Sequence
  VARIANT (0)...(0): Xaa = any or no amino acid
KXXWWETWWXXXSQPKKXRKX

SEQ ID NO: 3655 - protein, 20 aa, Artificial Sequence
  Synthetic Sequence
KETWWETWWTEWSQPKKRKV

SEQ ID NO: 3656 - protein, 20 aa, Artificial Sequence
  Synthetic Sequence
KETWWETWWTEASQPKKRKV

SEQ ID NO: 3657 - protein, 21 aa, Artificial Sequence
  Synthetic Sequence
KETWWETWWETWSQPKKKRKV

SEQ ID NO: 3658 - protein, 19 aa, Artificial Sequence
  Synthetic Sequence
KETWWETWTWSQPKKKRKV

SEQ ID NO: 3659 - protein, 19 aa, Artificial Sequence
  Synthetic Sequence
KWWETWWETWSQPKKKRKV

SEQ ID NO: 3660 - protein, 21 aa, Artificial Sequence
  Synthetic Sequence
  VARIANT (0)...(0): Xaa = any or no amino acid
KETWWETWWXXWSQPKKKRKV

SEQ ID NO: 3661 - protein, 15 aa, Artificial Sequence
  Synthetic Sequence
GALFLGWLGAAGSTM

SEQ ID NO: 3662 - protein, 27 aa, Artificial Sequence
  Synthetic Sequence
GALFLGWLGAAGSTMGAWSQPKKKRKV

SEQ ID NO: 3663 - protein, 30 aa, Artificial Sequence
  Synthetic Sequence
MVKSKIGSWILVLFVAMWSDVGLCKKRPKP

SEQ ID NO: 3664 - protein, 18 aa, Artificial Sequence
  Synthetic Sequence
RGGRLSYSRRRFSTSTGR

SEQ ID NO: 3665 - protein, 10 aa, Artificial Sequence
  Synthetic Sequence
RRLSYSRRRF

SEQ ID NO: 3666 - protein, 27 aa, Artificial Sequence
  Synthetic Sequence
GWTLNSAGYLLGKINLKALAALAKKIL

SEQ ID NO: 3667 - protein, 21 aa, Artificial Sequence
  Synthetic Sequence
AGYLLGKINLKALAALAKKIL

SEQ ID NO: 3668 - protein, 21 aa, Artificial Sequence
  Synthetic Sequence
RRRRRRWGRRRRRRPKKKRKV

SEQ ID NO: 3669 - protein, 32 aa, Artificial Sequence
  Synthetic Sequence
RRRRSRRRRRRFGRRRRRRVWRRRRPKKKRKV

SEQ ID NO: 3670 - protein, 13 aa, Artificial Sequence
  Synthetic Sequence
  MOD_RES 1: D-cysteine
CCSKAPKLPAAYC

SEQ ID NO: 3671 - protein, 9 aa, Artificial Sequence
  Synthetic Sequence
GGGGGCSKC

SEQ ID NO: 3672 - protein, 39 aa, Artificial Sequence
  Synthetic Sequence
CTTTHTFVKALTMDGKQAAWRFIRIDTACKKKKKKKKKK

SEQ ID NO: 3673 - protein, 13 aa, Artificial Sequence
  Synthetic Sequence
TTATDIKGKEVMV

SEQ ID NO: 3674 - protein, 9 aa, Artificial Sequence
  Synthetic Sequence
EVNINNSVF

SEQ ID NO: 3675 - protein, 11 aa, Artificial Sequence
  Synthetic Sequence
RGIDSKHWNSY

SEQ ID NO: 3676 - protein, 27 aa, Artificial Sequence
  Synthetic Sequence
TTTHTFVKALTMDGKQAAWRFIRIDTA

SEQ ID NO: 3677 - protein, 21 aa, Artificial Sequence
  Synthetic Sequence
ALWKTLLKKVLKAPKKKRKVC

SEQ ID NO: 3678 - protein, 18 aa, Artificial Sequence
  Synthetic Sequence
VRLPPPVRLPPPVRLPPP

SEQ ID NO: 3679 - protein, 24 aa, Artificial Sequence
  Synthetic Sequence
LGTYTQDFNKFHTFPQTAIGVGAP

SEQ ID NO: 3680 - protein, 22 aa, Artificial Sequence
  Synthetic Sequence
MVTVLFRRLRIRRACGPPRVRV

SEQ ID NO: 3681 - protein, 22 aa, Artificial Sequence
  Synthetic Sequence
MVRRFLVTLRIRRACGPPRVRV

SEQ ID NO: 3682 - protein, 22 aa, Artificial Sequence
  Synthetic Sequence
FVTRGCPRRLVARLIRVMVPRR

SEQ ID NO: 3683 - protein, 16 aa, Artificial Sequence
  Synthetic Sequence
AAVALLPAVLLALLAP

SEQ ID NO: 3684 - protein, 16 aa, Artificial Sequence
  Synthetic Sequence
AAVLLPVLLPVLLAAP

SEQ ID NO: 3685 - protein, 15 aa, Artificial Sequence
  Synthetic Sequence
VTVLALGALAGVGVG

SEQ ID NO: 3686 - protein, 17 aa, Artificial Sequence
  Synthetic Sequence
GALFLGWLGAAGSTMGA

SEQ ID NO: 3687 - protein, 15 aa, Artificial Sequence
  Synthetic Sequence
MGLGLHLLVLAAALQ

SEQ ID NO: 3688 - protein, 27 aa, Artificial Sequence
  Synthetic Sequence
MGLGLHLLVLAAALQGAWSQPKKKRKV

SEQ ID NO: 3689 - protein, 24 aa, Artificial Sequence
  Synthetic Sequence
LGTYTQDFNKFHTFPQTAIGVGAP

SEQ ID NO: 3690 - protein, 16 aa, Artificial Sequence
  Synthetic Sequence
TPPKKKRKVEDPKKKK

SEQ ID NO: 3691 - protein, 37 aa, Artificial Sequence
  Synthetic Sequence
LLGDFFRKSKEKIGKEFKRIVQRIKDFLRNLVPRTES

SEQ ID NO: 3692 - protein, 13 aa, Artificial Sequence
  Synthetic Sequence
ALWKTLLKKVLKA

SEQ ID NO: 3693 - protein, 20 aa, Artificial Sequence
  Synthetic Sequence
ALWKTLLKKVLKAPKKKRKV

SEQ ID NO: 3694 - protein, 20 aa, Artificial Sequence
  Synthetic Sequence
PKKKRKVALWKTLLKKVLKA

SEQ ID NO: 3695 - protein, 22 aa, Artificial Sequence
  Synthetic Sequence
RQARRNRRRALWKTLLKKVLKA

SEQ ID NO: 3696 - protein, 8 aa, Artificial Sequence
  Synthetic Sequence
IVIAKLKA

SEQ ID NO: 3697 - protein, 19 aa, Artificial Sequence
  Synthetic Sequence
IVIAKLKANLMCKTCRLAK

SEQ ID NO: 3698 - protein, 5 aa, Artificial Sequence
  Synthetic Sequence
KVKKQ

SEQ ID NO: 3699 - protein, 17 aa, Artificial Sequence
  Synthetic Sequence
DAAKKAAKKAAKKAAKK

SEQ ID NO: 3700 - protein, 6 aa, Artificial Sequence
  Synthetic Sequence
PFVYLI

SEQ ID NO: 3701 - protein, 17 aa, Artificial Sequence
  Synthetic Sequence
CSIPPEVKFNKPFVYLI

SEQ ID NO: 3702 - protein, 23 aa, Artificial Sequence
  Synthetic Sequence
  VARIANT (0)...(0): Xaa = any or no amino acid
XXXKKRRXXXXXXTWXETWWXXX

SEQ ID NO: 3703 - protein, 22 aa, Artificial Sequence
  Synthetic Sequence
  VARIANT (0)...(0): Xaa = any or no amino acid
YGFKKRRXXQXXXTWXETWWTE

SEQ ID NO: 3704 - protein, 20 aa, Artificial Sequence
  Synthetic Sequence
  VARIANT (0)...(0): Xaa = any or no amino acid
YGFKKXRRPWTWWETWWTEX

SEQ ID NO: 3705 - protein, 14 aa, Artificial Sequence
  Synthetic Sequence
  VARIANT 1: Xaa = any amin acid
  VARIANT 2, 3, 6, 10, 13, 14: Xaa = Lys, His, homolysine, Dbu, Arg, Orn, homoarginine
  VARIANT 4, 5, 8, 12: Xaa = Ala, Val, Leu, Ile, Phe, Tyr, Trp, Cys, Met
  VARIANT 7, 9, 11: Xaa = Lys, His, homolysine, Dbu, Arg, Orn, homoarginine, Ala, Val, Leu, Ile, Phe, Tyr, Trp, Cys, Met, Gly, Ser, Thr, Asn, Gln, Asp, Glu
XXXXXXXXXXXXXX

SEQ ID NO: 3706 - protein, 14 aa, Artificial Sequence
  Synthetic Sequence
  VARIANT 14: Xaa = any amin acid
  VARIANT 1, 2, 5, 9, 12, 13: Xaa = Lys, His, homolysine, Dbu, Arg, Orn, homoarginine
  VARIANT 3, 7, 10, 11: Xaa = Ala, Val, Leu, Ile, Phe, Tyr, Trp, Cys, Met
  VARIANT 4, 6, 8: Xaa = Lys, His, homolysine, Dbu, Arg, Orn, homoarginine, Ala, Val, Leu, Ile, Phe, Tyr, Trp, Cys, Met, Gly, Ser, Thr, Asn, Gln, Asp, Glu
XXXXXXXXXXXXXX

SEQ ID NO: 3707 - protein, 11 aa, Artificial Sequence
  Synthetic Sequence
YGRRARRRRRR

SEQ ID NO: 3708 - protein, 11 aa, Artificial Sequence
  Synthetic Sequence
YGRRARRRARR

SEQ ID NO: 3709 - protein, 11 aa, Artificial Sequence
  Synthetic Sequence
YGRRRRRRRRR

SEQ ID NO: 3710 - protein, 7 aa, Artificial Sequence
  Synthetic Sequence
HAIYPRH

SEQ ID NO: 3711 - protein, 12 aa, Artificial Sequence
  Synthetic Sequence
THRPPMWSPVWP

SEQ ID NO: 3712 - protein, 8 aa, Artificial Sequence
  Synthetic Sequence
  VARIANT (0)...(0): Xaa = D-threonine
GFXTGFLS

SEQ ID NO: 3713 - protein, 7 aa, Artificial Sequence
  Synthetic Sequence
GFTGFLS

SEQ ID NO: 3714 - protein, 29 aa, Artificial Sequence
  Synthetic Sequence
YTIWMPENPRPGTPCDIFTNSRGKRASNG

SEQ ID NO: 3715 - protein, 7 aa, Artificial Sequence
  Synthetic Sequence
GGGVFWQ

SEQ ID NO: 3716 - protein, 7 aa, Artificial Sequence
  Synthetic Sequence
HGRVRPH

SEQ ID NO: 3717 - protein, 7 aa, Artificial Sequence
  Synthetic Sequence
VVLVTSS

SEQ ID NO: 3718 - protein, 8 aa, Artificial Sequence
  Synthetic Sequence
CLHRGNSC

SEQ ID NO: 3719 - protein, 12 aa, Artificial Sequence
  Synthetic Sequence
CRSWNKADNRSC

SEQ ID NO: 3720 - protein, 7 aa, Artificial Sequence
  Synthetic Sequence
LSIPPKA

SEQ ID NO: 3721 - protein, 7 aa, Artificial Sequence
  Synthetic Sequence
FQTPPQL

SEQ ID NO: 3722 - protein, 7 aa, Artificial Sequence
  Synthetic Sequence
LTPATAI

SEQ ID NO: 3723 - protein, 35 aa, Artificial Sequence
  Synthetic Sequence
GGGARKKAAKAARKKAAKAARKKAAKAARKKAAKA

SEQ ID NO: 3724 - protein, 22 aa, Artificial Sequence
  Synthetic Sequence
RSQSRSRYYRQRQRSRRRRRRS

SEQ ID NO: 3725 - protein, 16 aa, Artificial Sequence
  Synthetic Sequence
GLFGAIAGFIENGWEG

SEQ ID NO: 3726 - protein, 19 aa, Artificial Sequence
  Synthetic Sequence
  VARIANT 12: Xaa = Asn or Gly
  VARIANT 18: Xaa = Ile or Val
GLFGAIAGFIGXGWGGMXD

SEQ ID NO: 3727 - protein, 20 aa, Artificial Sequence
  Synthetic Sequence
GDIMGEWGNEIFGAIAGFLG

SEQ ID NO: 3728 - protein, 30 aa, Artificial Sequence
  Synthetic Sequence
RRRQRRKKRGGDIMGEWGNEIFGAIAGFLG

SEQ ID NO: 3729 - protein, 10 aa, Artificial Sequence
  Synthetic Sequence
CHKKKKKKHC

SEQ ID NO: 3730 - protein, 17 aa, Artificial Sequence
  Synthetic Sequence
CHHHHHHKKKHHHHHHC

SEQ ID NO: 3731 - protein, 8 aa, Artificial Sequence
  Synthetic Sequence
HHHHHWYG

SEQ ID NO: 3732 - protein, 16 aa, Artificial Sequence
  Synthetic Sequence
FFGAVIGTIALGVATA

SEQ ID NO: 3733 - protein, 16 aa, Artificial Sequence
  Synthetic Sequence
FLGFLLGVGSAIASGV

SEQ ID NO: 3734 - protein, 16 aa, Artificial Sequence
  Synthetic Sequence
GVFVLGFLGFLATAGS

SEQ ID NO: 3735 - protein, 16 aa, Artificial Sequence
  Synthetic Sequence
GAAIGLAWIPYFGPAA

SEQ ID NO: 3736 - protein, 26 aa, Artificial Sequence
  Synthetic Sequence
GIGAVLKVLTTGLPALISWIKRKRQQ

SEQ ID NO: 3737 - protein, 4 aa, Artificial Sequence
  Synthetic Sequence
EALA

SEQ ID NO: 3738 - protein, 4 aa, Artificial Sequence
  Synthetic Sequence
GALA

SEQ ID NO: 3739 - protein, 30 aa, Artificial Sequence
  Synthetic Sequence
WEAALAEALAEALAEHLAEALAEALEALAA

SEQ ID NO: 3740 - protein, 4 aa, Artificial Sequence
  Synthetic Sequence
KALA

SEQ ID NO: 3741 - protein, 30 aa, Artificial Sequence
  Synthetic Sequence
WEAKLAKALAKALAKHLAKALAKALKACEA

SEQ ID NO: 3742 - protein, 4 aa, Artificial Sequence
  Synthetic Sequence
EGLA

SEQ ID NO: 3743 - protein, 20 aa, Artificial Sequence
  Synthetic Sequence
GLFEALLELLESLWELLLEA

SEQ ID NO: 3744 - protein, 20 aa, Artificial Sequence
  Synthetic Sequence
GLFKALLKLLKSLWKLLLKA

SEQ ID NO: 3745 - protein, 20 aa, Artificial Sequence
  Synthetic Sequence
GLFRALLRLLRSLWRLLLRA

SEQ ID NO: 3746 - DNA, 32 bp, Artificial Sequence
  Synthetic Sequence
gcaaacctgcatgactcacgcccaaagaatgc

SEQ ID NO: 3747 - DNA, 22 bp, Artificial Sequence
  Synthetic Sequence
tgcatgactcacgcccaaagaa

SEQ ID NO: 3748 - DNA, 22 bp, Artificial Sequence
  Synthetic Sequence
gcaaacctgcatgactcacgcc

SEQ ID NO: 3749 - DNA, 35 bp, Artificial Sequence
  Synthetic Sequence
ccctgattggacatttcctggagctcattgtctga

SEQ ID NO: 3750 - DNA, 22 bp, Artificial Sequence
  Synthetic Sequence
ggacatttcctggagctcattg

SEQ ID NO: 3751 - DNA, 22 bp, Artificial Sequence
  Synthetic Sequence
ccctgattggacatttcctgga

SEQ ID NO: 3752 - DNA, 40 bp, Artificial Sequence
  Synthetic Sequence
ctcagagggccatcatggtctcattgcacactcctgggag

SEQ ID NO: 3753 - DNA, 22 bp, Artificial Sequence
  Synthetic Sequence
gggccatcatggtctcattgca

SEQ ID NO: 3754 - DNA, 19 bp, Artificial Sequence
  Synthetic Sequence
cagagggccatcatggtct

SEQ ID NO: 3755 - DNA, 183 bp, Artificial Sequence
  Synthetic Sequence
ccggtcacggaccctgtgcccatgctgctgctcgtcacggaccctgtgcccatgctgctgctcctggcgacgccgcgttgtgggcactgggaggcgccgtatttatagcgctccgttcgcgcacacacctttggggctggctgcaaacctgcatgactcacgcccaaagaatgccgcggaaag

SEQ ID NO: 3756 - DNA, 20 bp, Artificial Sequence
  Synthetic Sequence
gcccaaagaatgccgcggaa

SEQ ID NO: 3757 - DNA, 19 bp, Artificial Sequence
  Synthetic Sequence
gggctggctgcaaacctgc

SEQ ID NO: 3758 - DNA, 20 bp, Artificial Sequence
  Synthetic Sequence
gctccgttcgcgcacacacc

SEQ ID NO: 3759 - DNA, 20 bp, Artificial Sequence
  Synthetic Sequence
ccgcgttgtgggcactggga

SEQ ID NO: 3760 - DNA, 20 bp, Artificial Sequence
  Synthetic Sequence
tgctgctcctggcgacgccg

SEQ ID NO: 3761 - DNA, 20 bp, Artificial Sequence
  Synthetic Sequence
ccctgtgcccatgctgctgc

SEQ ID NO: 3762 - DNA, 20 bp, Artificial Sequence
  Synthetic Sequence
cggtcacggaccctgtgccc

SEQ ID NO: 3763 - DNA, 32 bp, Artificial Sequence
  Synthetic Sequence
cagcagagtcttcatcatgcctccaattcttg

SEQ ID NO: 3764 - DNA, 22 bp, Artificial Sequence
  Synthetic Sequence
ttcatcatgcctccaattctgg

SEQ ID NO: 3765 - DNA, 22 bp, Artificial Sequence
  Synthetic Sequence
cagcagcagagtcttcatcatg

SEQ ID NO: 3766 - DNA, 269 bp, Artificial Sequence
  Synthetic Sequence
cttgactttcaagacgcggaggcaacagcagccagcccttcacaccgaatccatctgcatcctagtgggagacttgggccgggctgcctgtgcattcaggggtggaagtagtggaagccaggaaggacaattccttcggagagtagagagggttcgcagtggcccgaggagcaggcttcccagagaaagtccctttggaaggatgagtcctcttgctctgccaggccctccacactgcccatcccctctaagccgacacgaggctgccc

SEQ ID NO: 3767 - DNA, 20 bp, Artificial Sequence
  Synthetic Sequence
tgcccatcccctctaagccg

SEQ ID NO: 3768 - DNA, 20 bp, Artificial Sequence
  Synthetic Sequence
tgccaggccctccacactgc

SEQ ID NO: 3769 - DNA, 20 bp, Artificial Sequence
  Synthetic Sequence
cttgctctgccaggccctcc

SEQ ID NO: 3770 - DNA, 20 bp, Artificial Sequence
  Synthetic Sequence
cgcagtggcccgaggagcag

SEQ ID NO: 3771 - DNA, 20 bp, Artificial Sequence
  Synthetic Sequence
gccgggctgcctgtgcattc

SEQ ID NO: 3772 - DNA, 20 bp, Artificial Sequence
  Synthetic Sequence
ggagacttgggccgggctgc

SEQ ID NO: 3773 - DNA, 20 bp, Artificial Sequence
  Synthetic Sequence
gcagccagcccttcacaccg

SEQ ID NO: 3774 - DNA, 20 bp, Artificial Sequence
  Synthetic Sequence
gacgcggaggcaacagcagc

SEQ ID NO: 3775 - DNA, 51 bp, Artificial Sequence
  Synthetic Sequence
cagcaggcccatctggacactcagtagcacattaacaaggagtgcctctca

SEQ ID NO: 3776 - DNA, 23 bp, Artificial Sequence
  Synthetic Sequence
cacattaacaaggagtgcctctc

SEQ ID NO: 3777 - DNA, 23 bp, Artificial Sequence
  Synthetic Sequence
tctggacactcagtagcacatta

SEQ ID NO: 3778 - DNA, 48 bp, Artificial Sequence
  Synthetic Sequence
gtctttgcacgcctccatttgccatcacagaaccaacaggacgatggg

SEQ ID NO: 3779 - DNA, 22 bp, Artificial Sequence
  Synthetic Sequence
cgcctccatttgccatcacaga

SEQ ID NO: 3780 - DNA, 20 bp, Artificial Sequence
  Synthetic Sequence
cacgcctccatttgccatca

SEQ ID NO: 3781 - DNA, 140 bp, Artificial Sequence
  Synthetic Sequence
ccatttgccatcacagaaccaacaggacgatgggttccccttcctgaaatggttcacatccaaagcccgctcagcccagcaggcccatctggacactcagtagcacattaacaaggagtgcctctcatgagaagtaatca

SEQ ID NO: 3782 - DNA, 20 bp, Artificial Sequence
  Synthetic Sequence
cagcaggcccatctggacac

SEQ ID NO: 3783 - DNA, 20 bp, Artificial Sequence
  Synthetic Sequence
tccaaagcccgctcagccca

SEQ ID NO: 3784 - DNA, 20 bp, Artificial Sequence
  Synthetic Sequence
ggttcacatccaaagcccgc

SEQ ID NO: 3785 - DNA, 20 bp, Artificial Sequence
  Synthetic Sequence
cgatgggttccccttcctga

SEQ ID NO: 3786 - DNA, 47 bp, Artificial Sequence
  Synthetic Sequence
gctcaaaacttttagcgccagtcttgagcacatgggaggggaaaacc

SEQ ID NO: 3787 - DNA, 20 bp, Artificial Sequence
  Synthetic Sequence
gcacatgggaggggaaaacc

SEQ ID NO: 3788 - DNA, 20 bp, Artificial Sequence
  Synthetic Sequence
gtcttgagcacatgggaggg

SEQ ID NO: 3789 - DNA, 20 bp, Artificial Sequence
  Synthetic Sequence
gcgccagtcttgagcacatg

SEQ ID NO: 3790 - DNA, 48 bp, Artificial Sequence
  Synthetic Sequence
gacgctaggatctgactgcggctcctccatggcagtgacccggaaggc

SEQ ID NO: 3791 - DNA, 22 bp, Artificial Sequence
  Synthetic Sequence
ccatggcagtgacccggaaggc

SEQ ID NO: 3792 - DNA, 21 bp, Artificial Sequence
  Synthetic Sequence
gcggctcctccatggcagtga

SEQ ID NO: 3793 - DNA, 22 bp, Artificial Sequence
  Synthetic Sequence
tctgactgcggctcctccatgg

SEQ ID NO: 3794 - DNA, 41 bp, Artificial Sequence
  Synthetic Sequence
tcaatatcgtccggggacagcatcaaatcatccattgcttg

SEQ ID NO: 3795 - DNA, 22 bp, Artificial Sequence
  Synthetic Sequence
gcatcaaatcatccattgcttg

SEQ ID NO: 3796 - DNA, 22 bp, Artificial Sequence
  Synthetic Sequence
gggacagcatcaaatcatccat

SEQ ID NO: 3797 - DNA, 32 bp, Artificial Sequence
  Synthetic Sequence
gagtgagccctgctcccccctggctccttccc

SEQ ID NO: 3798 - DNA, 20 bp, Artificial Sequence
  Synthetic Sequence
tgagccctgctcccccctgg

SEQ ID NO: 3799 - protein, 10 aa, Artificial Sequence
  Synthetic Sequence
  VARIANT 1: Xaa = amino acid with relatively high freedom at the phi and omega rotations, particularly a Gly or Ala
  VARIANT 4: Xaa = any amino acid, particularly a basic amino acid
  VARIANT 2, 3, 5-10: Xaa = any amino acid, wherein at least 3 residues of 2-10 are Arg or Lys
XXXXXXXXXX

SEQ ID NO: 3800 - protein, 9 aa, Artificial Sequence
  Synthetic Sequence
  VARIANT 3: Xaa = any amino acid, particularly a basic amino acid
  VARIANT 1, 2, 4-9: Xaa = any amino acid, wherein at least 3 residues of 1-9 are Arg or Lys
XXXXXXXXX

SEQ ID NO: 3801 - protein, 7 aa, Artificial Sequence
  Synthetic Sequence
  VARIANT 1, 2, 5, 7: Xaa = hydrophobic amino acid
  VARIANT 3, 4, 6: Xaa = any basic amino acid
XXXXXXX
